United States Patent Application Publication US 2026/0337666 A1 - sequence listing, part 19

SEQ ID NO: 34715 - protein, 68 aa, Homo sapiens
  REGION 1..68: note = ENSP00000404818
  VARIANT 1: note = Any amino acid
XLRWWQPRHNGTGHDQWALDHVEVVLDEKSYIASKPDQTFMTNHSAACIERHFLTCVIFHYLLSLVFH

SEQ ID NO: 34716 - protein, 3458 aa, Homo sapiens
  REGION 1..3458: note = ENSP00000345694
MERSGWARQTFLLALLLGATLRARAAAGYYPRFSPFFFLCTHHGELEGDGEQGEVLISLHIAGNPTYYVPGQEYHVTISTSTFFDGLLVTGLYTSTSVQASQSIGGSSAFGFGIMSDHQFGNQFMCSVVASHVSHLPTTNLSFIWIAPPAGTGCVNFMATATHRGQVIFKDALAQQLCEQGAPTDVTVHPHLAEIHSDSIILRDDFDSYHQLQLNPNIWVECNNCETGEQCGAIMHGNAVTFCEPYGPRELITTGLNTTTASVLQFSIGSGSCRFSYSDPSIIVLYAKNNSADWIQLEKIRAPSNVSTIIHILYLPEDAKGENVQFQWKQENLRVGEVYEACWALDNILIINSAHRQVVLEDSLDPVDTGNWLFFPGATVKHSCQSDGNSIYFHGNEGSEFNFATTRDVDLSTEDIQEQWSEEFESQPTGWDVLGAVIGTECGTIESGLSMVFLKDGERKLCTPSMDTTGYGNLRFYFVMGGICDPGNSHENDIILYAKIEGRKEHITLDTLSYSSYKVPSLVSVVINPELQTPATKFCLRQKNHQGHNRNVWAVDFFHVLPVLPSTMSHMIQFSINLGCGTHQPGNSVSLEFSTNHGRSWSLLHTECLPEICAGPHLPHSTVYSSENYSGWNRITIPLPNAALTRNTRIRWRQTGPILGNMWAIDNVYIGPSCLKFCSGRGQCTRHGCKCDPGFSGPACEMASQTFPMFISESFGSSRLSSYHNFYSIRGAEVSFGCGVLASGKALVFNKDGRRQLITSFLDSSQSRFLQFTLRLGSKSVLSTCRAPDQPGEGVLLHYSYDNGITWKLLEHYSYLSYHEPRIISVELPGDAKQFGIQFRWWQPYHSSQREDVWAIDEIIMTSVLFNSISLDFTNLVEVTQSLGFYLGNVQPYCGHDWTLCFTGDSKLASSMRYVETQSMQIGASYMIQFSLVMGCGQKYTPHMDNQVKLEYSTNHGLTWHLVQEECLPSMPSCQEFTSASIYHASEFTQWRRVIVLLPQKTWSSATRFRWSQSYYTAQDEWALDSIYIGQQCPNMCSGHGSCDHGICRCDQGYQGTECHPEAALPSTIMSDFENQNGWESDWQEVIGGEIVKPEQGCGVISSGSSLYFSKAGKRQLVSWDLDTSWVDFVQFYIQIGGESASCNKPDSREEGVLLQYSNNGGIQWHLLAEMYFSDFSKPRFVYLELPAAAKTPCTRFRWWQPVFSGEDYDQWAVDDIIILSEKQKQIIPVINPTLPQNFYEKPAFDYPMNQMSVWLMLANEGMVKNETFCAATPSAMIFGKSDGDRFAVTRDLTLKPGYVLQFKLNIGCANQFSSTAPVLLQYSHDAGMSWFLVKEGCYPASAGKGCEGNSRELSEPTMYHTGDFEEWTRITIVIPRSLASSKTRFRWIQESSSQKNVPPFGLDGVYISEPCPSYCSGHGDCISGVCFCDLGYTAAQGTCVSNVPNHNEMFDRFEGKLSPLWYKITGAQVGTGCGTLNDGKSLYFNGPGKREARTVPLDTRNIRLVQFYIQIGSKTSGITCIKPRTRNEGLIVQYSNDNGILWHLLRELDFMSFLEPQIISIDLPQDAKTPATAFRWWQPQHGKHSAQWALDDVLIGMNDSSQTGFQDKFDGSIDLQANWYRIQGGQVDIDCLSMDTALIFTENIGKPRYAETWDFHVSASTFLQFEMSMGCSKPFSNSHSVQLQYSLNNGKDWHLVTEECVPPTIGCLHYTESSIYTSERFQNWKRITVYLPLSTISPRTRFRWIQANYTVGADSWAIDNVVLASGCPWMCSGRGICDAGRCVCDRGFGGPYCVPVVPLPSILKDDFNGNLHPDLWPEVYGAERGNLNGETIKSGTSLIFKGEGLRMLISRDLDCTNTMYVQFSLRFIAKSTPERSHSILLQFSISGGITWHLMDEFYFPQTTNILFINVPLPYTAQTNATRFRLWQPYNNGKKEEIWIVDDFIIDGNNVNNPVMLLDTFDFGPREDNWFFYPGGNIGLYCPYSSKGAPEEDSAMVFVSNEVGEHSITTRDLNVNENTIIQFEINVGCSTDSSSADPVRLEFSRDFGATWHLLLPLCYHSSSHVSSLCSTEHHPSSTYYAGTMQGWRREVVHFGKLHLCGSVRFRWYQGFYPAGSQPVTWAIDNVYIGPQCEEMCNGQGSCINGTKCICDPGYSGPTCKISTKNPDFLKDDFEGQLESDRFLLMSGGKPSRKCGILSSGNNLFFNEDGLRMLMTRDLDLSHARFVQFFMRLGCGKGVPDPRSQPVLLQYSLNGGLSWSLLQEFLFSNSSNVGRYIALEIPLKARSGSTRLRWWQPSENGHFYSPWVIDQILIGGNISGNTVLEDDFTTLDSRKWLLHPGGTKMPVCGSTGDALVFIEKASTRYVVSTDVAVNEDSFLQIDFAASCSVTDSCYAIELEYSVDLGLSWHPLVRDCLPTNVECSRYHLQRILVSDTFNKWTRITLPLPPYTRSQATRFRWHQPAPFDKQQTWAIDNVYIGDGCIDMCSGHGRCIQGNCVCDEQWGGLYCDDPETSLPTQLKDNFNRAPSSQNWLTVNGGKLSTVCGAVASGMALHFSGGCSRLLVTVDLNLTNAEFIQFYFMYGCLITPNNRNQGVLLEYSVNGGITWNLLMEIFYDQYSKPGFVNILLPPDAKEIATRFRWWQPRHDGLDQNDWAIDNVLISGSADQRTVMLDTFSSAPVPQHERSPADAGPVGRIAFDMFMEDKTSVNEHWLFHDDCTVERFCDSPDGVMLCGSHDGREVYAVTHDLTPTEGWIMQFKISVGCKVSEKIAQNQIHVQYSTDFGVSWNYLVPQCLPADPKCSGSVSQPSVFFPTKGWKRITYPLPESLVGNPVRFRFYQKYSDMQWAIDNFYLGPGCLDNCRGHGDCLREQCICDPGYSGPNCYLTHTLKTFLKERFDSEEIKPDLWMSLEGGSTCTECGILAEDTALYFGGSTVRQAVTQDLDLRGAKFLQYWGRIGSENNMTSCHRPICRKEGVLLDYSTDGGITWTLLHEMDYQKYISVRHDYILLPEDALTNTTRLRWWQPFVISNGIVVSGVERAQWALDNILIGGAEINPSQLVDTFDDEGTSHEENWSFYPNAVRTAGFCGNPSFHLYWPNKKKDKTHNALSSRELIIQPGYMMQFKIVVGCEATSCGDLHSVMLEYTKDARSDSWQLVQTQCLPSSSNSIGCSPFQFHEATIYNSVNSSSWKRITIQLPDHVSSSATQFRWIQKGEETEKQSWAIDHVYIGEACPKLCSGHGYCTTGAICICDESFQGDDCSVFSHDLPSYIKDNFESARVTEANWETIQGGVIGSGCGQLAPYAHGDSLYFNGCQIRQAATKPLDLTRASKIMFVLQIGSMSQTDSCNSDLSGPHAVDKAVLLQYSVNNGITWHVIAQHQPKDFTQAQRVSYNVPLEARMKGVLLRWWQPRHNGTGHDQWALDHVEVVLTRKQNYMMNFSRQHGLRHFYNRRRRSLRRYP

SEQ ID NO: 34717 - protein, 3460 aa, Homo sapiens
  REGION 1..3460: note = ENSP00000392423
MERSGWARQTFLLALLLGATLRARAAAGYYPRFSPFFFLCTHHGELEGDGEQGEVLISLHIAGNPTYYVPGQEYHVTISTSTFFDGLLVTGLYTSTSVQASQSIGGSSAFGFGIMSDHQFGNQFMCSVVASHVSHLPTTNLSFIWIAPPAGTGCVNFMATATHRGQVIFKDALAQQLCEQGAPTDVTVHPHLAEIHSDSIILRDDFDSYHQLQLNPNIWVECNNCETGEQCGAIMHGNAVTFCEPYGPRELITTGLNTTTASVLQFSIGSGSCRFSYSDPSIIVLYAKNNSADWIQLEKIRAPSNVSTIIHILYLPEDAKGENVQFQWKQENLRVGEVYEACWALDNILIINSAHRQVVLEDSLDPVDTGNWLFFPGATVKHSCQSDGNSIYFHGNEGSEFNFATTRDVDLSTEDIQEQWSEEFESQPTGWDVLGAVIGTECGTIESGLSMVFLKDGERKLCTPSMDTTGYGNLRFYFVMGGICDPGNSHENDIILYAKIEGRKEHITLDTLSYSSYKVPSLVSVVINPELQTPATKFCLRQKNHQGHNRNVWAVDFFHVLPVLPSTMSHMIQFSINLGCGTHQPGNSVSLEFSTNHGRSWSLLHTECLPEICAGPHLPHSTVYSSENYSGWNRITIPLPNAALTRNTRIRWRQTGPILGNMWAIDNVYIGPSCLKFCSGRGQCTRHGCKCDPGFSGPACEMASQTFPMFISESFGSSRLSSYHNFYSIRGAEVSFGCGVLASGKALVFNKDGRRQLITSFLDSSQSRFLQFTLRLGSKSVLSTCRAPDQPGEGVLLHYSYDNGITWKLLEHYSYLSYHEPRIISVELPGDAKQFGIQFRWWQPYHSSQREDVWAIDEIIMTSVLFNSISLDFTNLVEVTQSLGFYLGNVQPYCGHDWTLCFTGDSKLASSMRYVETQSMQIGASYMIQFSLVMGCGQKYTPHMDNQVKLEYSTNHGLTWHLVQEECLPSMPSCQEFTSASIYHASEFTQWRRVIVLLPQKTWSSATRFRWSQSYYTAQDEWALDSIYIGQQCPNMCSGHGSCDHGICRCDQGYQGTECHPEAALPSTIMSDFENQNGWESDWQEVIGGEIVKPEQGCGVISSGSSLYFSKAGKRQLVSWDLDTSWVDFVQFYIQIGGESASCNKPDSREEGVLLQYSNNGGIQWHLLAEMYFSDFSKPRFVYLELPAAAKTPCTRFRWWQPVFSGEDYDQWAVDDIIILSEKQKQIIPVINPTLPQNFYEKPAFDYPMNQMSVWLMLANEGMVKNETFCAATPSAMIFGKSDGDRFAVTRDLTLKPGYVLQFKLNIGCANQFSSTAPVLLQYSHDAGMSWFLVKEGCYPASAGKGCEGNSRELSEPTMYHTGDFEEWTRITIVIPRSLASSKTRFRWIQESSSQKNVPPFGLDGVYISEPCPSYCSGHGDCISGVCFCDLGYTAAQGTCVSNVPNHNEMFDRFEGKLSPLWYKITGAQVGTGCGTLNDGKSLYFNGPGKREARTVPLDTRNIRLVQFYIQIGSKTSGITCIKPRTRNEGLIVQYSNDNGILWHLLRELDFMSFLEPQIISIDLPQDAKTPATAFRWWQPQHGKHSAQWALDDVLIGMNDSSQTGFQDKFDGSIDLQANWYRIQGGQVDIDCLSMDTALIFTENIGKPRYAETWDFHVSASTFLQFEMSMGCSKPFSNSHSVQLQYSLNNGKDWHLVTEECVPPTIGCLHYTESSIYTSERFQNWKRITVYLPLSTISPRTRFRWIQANYTVGADSWAIDNVVLASGCPWMCSGRGICDAGRCVCDRGFGGPYCVPVVPLPSILKDDFNGNLHPDLWPEVYGAERGNLNGETIKSGTSLIFKGEGLRMLISRDLDCTNTMYVQFSLRFIAKSTPERSHSILLQFSISGGITWHLMDEFYFPQTTNILFINVPLPYTAQTNATRFRLWQPYNNGKKEEIWIVDDFIIDGNNVNNPVMLLDTFDFGPREDNWFFYPGGNIGLYCPYSSKGAPEEDSAMVFVSNEVGEHSITTRDLNVNENTIIQFEINVGCSTDSSSADPVRLEFSRDFGATWHLLLPLCYHSSSHVSSLCSTEHHPSSTYYAGTMQGWRREVVHFGKLHLCGSVRFRWYQGFYPAGSQPVTWAIDNVYIGPQCEEMCNGQGSCINGTKCICDPGYSGPTCKISTKNPDFLKDDFEGQLESDRFLLMSGGKPSRKCGILSSGNNLFFNEDGLRMLMTRDLDLSHARFVQFFMRLGCGKGVPDPRSQPVLLQYSLNGGLSWSLLQEFLFSNSSNVGRYIALEIPLKARSGSTRLRWWQPSENGHFYSPWVIDQILIGGNISGNTVLEDDFTTLDSRKWLLHPGGTKMPVCGSTGDALVFIEKASTRYVVSTDVAVNEDSFLQIDFAASCSVTDSCYAIELEYSVDLGLSWHPLVRDCLPTNVECSRYHLQRILVSDTFNKWTRITLPLPPYTRSQATRFRWHQPAPFDKQQTWAIDNVYIGDGCIDMCSGHGRCIQGNCVCDEQWGGLYCDDPETSLPTQLKDNFNRAPSSQNWLTVNGGKLSTVCGAVASGMALHFSGGCSRLLVTVDLNLTNAEFIQFYFMYGCLITPNNRNQGVLLEYSVNGGITWNLLMEIFYDQYSKPGFVNILLPPDAKEIATRFRWWQPRHDGLDQNDWAIDNVLISGSADQRTVMLDTFSSAPVPQHERSPADAGPVGRIAFDMFMEDKTSVNEHWLFHDDCTVERFCDSPDGVMLCGSHDGREVYAVTHDLTPTEGWIMQFKISVGCKVSEKIAQNQIHVQYSTDFGVSWNYLVPQCLPADPKCSGSVSQPSVFFPTKGWKRITYPLPESLVGNPVRFRFYQKYSDMQWAIDNFYLGPGCLDNCRGHGDCLREQCICDPGYSGPNCYLTHTLKTFLKERFDSEEIKPDLWMSLEGGSTCTECGILAEDTALYFGGSTVRQAVTQDLDLRGAKFLQYWGRIGSENNMTSCHRPICRKEGVLLDYSTDGGITWTLLHEMDYQKYISVRHDYILLPEDALTNTTRLRWWQPFVISNGIVVSGVERAQWALDNILIGGAEINPSQLVDTFDDEGTSHEENWSFYPNAVRTAGFCGNPSFHLYWPNKKKDKTHNALSSRELIIQPGYMMQFKIVVGCEATSCGDLHSVMLEYTKDARSDSWQLVQTQCLPSSSNSIGCSPFQFHEATIYNSVNSSSWKRITIQLPDHVSSSATQFRWIQKGEETEKQSWAIDHVYIGEACPKLCSGHGYCTTGAICICDESFQGDDCSVFSHDLPSYIKDNFESARVTEANWETIQGGVIGSGCGQLAPYAHGDSLYFNGCQIRQAATKPLDLTRASKIMFVLQIGSMSQTDSCNSDLSGPHAVDKAVLLQYSVNNGITWHVIAQHQPKDFTQAQRVSYNVPLEARMKGVLLRWWQPRHNGTGHDQWALDHVEVVLVSTRKQNYMMNFSRQHGLRHFYNRRRRSLRRYP

SEQ ID NO: 34718 - protein, 236 aa, Homo sapiens
  REGION 1..236: note = ENSP00000310335
MGQKASQQLALKDSKEVPVVCEVVSEAIVHAAQKLKEYLGFEYPPSKLCPAANTLNEIFLIHFITFCQEKGVDEWLTTTKMTKHQAFLFGADWIWTFWGSNKQIKLQLAVQTLQMSSPPPVESKPCDLSNPESRVEESSWKKSRFDKLEEFCNLIGEDCLGLFIIFGMPGKPKDIRGVVLDSVKSQMVRSHLPGGKAVAQFVLETEDCVFIKELLRNCLSKKDGLREVGKVYISIL

SEQ ID NO: 34719 - protein, 146 aa, Homo sapiens
  REGION 1..146: note = ENSP00000428562
MLERRCRGPLAMGLAQPRLLSGPSQESPQTLGKESRGLRQQGTSVAQSGAQAPGRAHRCAHCRRHFPGWVALWLHTRRCQARLPLPCPECGRRFRHAPFLALHRQVHAAATPDLGFACHLCGQSFRGWVALVLHLRAHSAAKRPIA

SEQ ID NO: 34720 - protein, 136 aa, Homo sapiens
  REGION 1..136: note = ENSP00000420578
MGIGVSLLLQFSLTPGGYRSVGRSRRCSRGSIPRNIPKRSWKKPHPQLCSLQGSSVSVCPASQSCCAARMWHRKQQTQGEGSIRHCREQWPHFLQRKNRCWNVVAGAPWPWAWPSPDSFLGPPRSHPRPWGRSPAG

SEQ ID NO: 34721 - protein, 55 aa, Homo sapiens
  REGION 1..55: note = ENSP00000418507
MDGRRVPAQPAAEQRKNRCWNVVAGAPWPWAWPSPDSFLGPPRSHPRPWGRSPAG

SEQ ID NO: 34722 - protein, 624 aa, Homo sapiens
  REGION 1..624: note = ENSP00000417291
MGIGVSLLLQFSLTPGGYRSVGRSRRCSRGSIPRNIPKRSWKKPHPQLCSLQAEEEPMLERRCRGPLAMGLAQPRLLSGPSQESPQTLGKESRGLRQQGTSVAQSGAQAPGRAHRCAHCRRHFPGWVALWLHTRRCQARLPLPCPECGRRFRHAPFLALHRQVHAAATPDLGFACHLCGQSFRGWVALVLHLRAHSAAKRPIACPKCERRFWRRKQLRAHLRRCHPPAPEARPFICGNCGRSFAQWDQLVAHKRVHVAEALEEAAAKALGPRPRGRPAVTAPRPGGDAVDRPFQCACCGKRFRHKPNLIAHRRVHTGERPHQCPECGKRFTNKPYLTSHRRIHTGEKPYPCKECGRRFRHKPNLLSHSKIHKRSEGSAQAAPGPGSPQLPAGPQESAAEPTPAVPLKPAQEPPPGAPPEHPQDPIEAPPSLYSCDDCGRSFRLERFLRAHQRQHTGERPFTCAECGKNFGKKTHLVAHSRVHSGERPFACEECGRRFSQGSHLAAHRRDHAPDRPFVCPDCGKAFRHKPYLAAHRRIHTGEKPYVCPDCGKAFSQKSNLVSHRRIHTGERPYACPDCDRSFSQKSNLITHRKSHIRDGAFCCAICGQTFDDEERLLAHQKKHDV

SEQ ID NO: 34723 - protein, 366 aa, Homo sapiens
  REGION 1..366: note = ENSP00000419789
MDGRRVPAQPAAEFSLTPGGYRSVGRSRRCSRGSIPRNIPKRSWKKPHPQLCSLQEEEPMLERRCRGPLAMGLAQPRLLSGPSQESPQTLGKESRGLRQQGTSVAQSGAQAPGRAHRCAHCRRHFPGWVALWLHTRRCQARLPLPCPECGRRFRHAPFLALHRQVHAAATPDLGFACHLCGQSFRGWVALVLHLRAHSAAKRPIACPKCERRFWRRKQLRAHLRRCHPPAPEARPFICGNCGRSFAQWDQLVAHKRVHVAEALEEAAAKALGPRPRGRPAVTAPRPGGDAVDRPFQCACCGKRFRHKPNLIAHRRVHTGERPHQCPECGKRFTNKPYLTSHRRIHTGEKPYPCKECGRRFRHKPNL

SEQ ID NO: 34724 - protein, 136 aa, Homo sapiens; identical to SEQ ID NO: 34720
  REGION 1..136: note = ENSP00000417982

SEQ ID NO: 34725 - protein, 393 aa, Homo sapiens
  REGION 1..393: note = ENSP00000419872
MDGRRVPAQPAAEFSLTPGGYRSVGRSRRCSRGSIPRNIPKRSWKKPHPQLCSLQAEEEPMLERRCRGPLAMGLAQPRLLSGPSQESPQTLGKESRGLRQQGTSVAQSGAQAPGRAHRCAHCRRHFPGWVALWLHTRRCQARLPLPCPECGRRFRHAPFLALHRQVHAAATPDLGFACHLCGQSFRGWVALVLHLRAHSAAKRPIACPKCERRFWRRKQLRAHLRRCHPPAPEARPFICGNCGRSFAQWDQLVAHKRVHVAEALEEAAAKALGPRPRGRPAVTAPRPGGDAVDRPFQCACCGKRFRHKPNLIAHRRVHTGERPHQCPECGKRFTNKPYLTSHRRIHTGEKPYPCKECGRRFRHKPNLLSHSKIHKRSEGSAQAAPGPGSPQLP

SEQ ID NO: 34726 - protein, 47 aa, Homo sapiens
  REGION 1..47: note = ENSP00000418279
MDGRRVPAQPAAEVRPGQGRGATAGPRGAAPPAGRVTVRLASLQSEV

SEQ ID NO: 34727 - protein, 136 aa, Homo sapiens
  REGION 1..136: note = ENSP00000428129
MDGRRVPAQPAAEVRPGQGRGATAGPRGAAPPAGRVTVSVRDRVRGRTDAGTSLQGPPGHGPGPAPTPFWALPGVTPDPGEGVPRAEATRHVSGPVWCPSPRQGPSLCPLSKALPWLGGSVASHPPVPGPAALALP

SEQ ID NO: 34728 - protein, 47 aa, Homo sapiens; identical to SEQ ID NO: 34726
  REGION 1..47: note = ENSP00000427721

SEQ ID NO: 34729 - protein, 87 aa, Homo sapiens
  REGION 1..87: note = ENSP00000417786
MGIGVSLLLQFSLTPGGYRSVGRSRRCSRGSIPRNIPKRSWKKPHPQLCSLQGLVIFDVSQLLHLLNRELSVCLSSFSELLCSSDVA

SEQ ID NO: 34730 - protein, 567 aa, Homo sapiens
  REGION 1..567: note = ENSP00000388287
MLERRCRGPLAMGLAQPRLLSGPSQESPQTLGKESRGLRQQGTSVAQSGAQAPGRAHRCAHCRRHFPGWVALWLHTRRCQARLPLPCPECGRRFRHAPFLALHRQVHAAATPDLGFACHLCGQSFRGWVALVLHLRAHSAAKRPIACPKCERRFWRRKQLRAHLRRCHPPAPEARPFICGNCGRSFAQWDQLVAHKRVHVAEALEEAAAKALGPRPRGRPAVTAPRPGGDAVDRPFQCACCGKRFRHKPNLIAHRRVHTGERPHQCPECGKRFTNKPYLTSHRRIHTGEKPYPCKECGRRFRHKPNLLSHSKIHKRSEGSAQAAPGPGSPQLPAGPQESAAEPTPAVPLKPAQEPPPGAPPEHPQDPIEAPPSLYSCDDCGRSFRLERFLRAHQRQHTGERPFTCAECGKNFGKKTHLVAHSRVHSGERPFACEECGRRFSQGSHLAAHRRDHAPDRPFVCPDCGKAFRHKPYLAAHRRIHTGEKPYVCPDCGKAFSQKSNLVSHRRIHTGERPYACPDCDRSFSQKSNLITHRKSHIRDGAFCCAICGQTFDDEERLLAHQKKHDV

SEQ ID NO: 34731 - protein, 567 aa, Homo sapiens; identical to SEQ ID NO: 34730
  REGION 1..567: note = ENSP00000380451

SEQ ID NO: 34732 - protein, 567 aa, Homo sapiens; identical to SEQ ID NO: 34730
  REGION 1..567: note = ENSP00000407714

SEQ ID NO: 34733 - protein, 199 aa, Homo sapiens
  REGION 1..199: note = ENSP00000256953
MAKSAEVKLAIFGRAGVGKSALVVRFLTKRFIWEYDPTLESTYRHQATIDDEVVSMEILDTAGQEDTIQREGHMRWGEGFVLVYDITDRGSFEEVLPLKNILDEIKKPKNVTLILVGNKADLDHSRQVSTEEGEKLATELACAFYECSACTGEGNITEIFYELCREVRRRRMVQGKTRRRSSTTHVKQAINKMLTKISS

SEQ ID NO: 34734 - protein, 199 aa, Homo sapiens; identical to SEQ ID NO: 34733
  REGION 1..199: note = ENSP00000441505

SEQ ID NO: 34735 - protein, 199 aa, Homo sapiens; identical to SEQ ID NO: 34733
  REGION 1..199: note = ENSP00000438280

SEQ ID NO: 34736 - protein, 180 aa, Homo sapiens
  REGION 1..180: note = ENSP00000444485
MAKSAEVKLAIFGRAGVGKSESTYRHQATIDDEVVSMEILDTAGQEDTIQREGHMRWGEGFVLVYDITDRGSFEEVLPLKNILDEIKKPKNVTLILVGNKADLDHSRQVSTEEGEKLATELACAFYECSACTGEGNITEIFYELCREVRRRRMVQGKTRRRSSTTHVKQAINKMLTKISS

SEQ ID NO: 34737 - protein, 113 aa, Homo sapiens
  REGION 1..113: note = ENSP00000439532
MIRYILQRRRMIHLRNWIVLKERKSITEKGNFKALVVRFLTKRFIWEYDPTLESTYRHQATIDDEVVSMEILDTAGQEDTIQREGHMRWGEGFVLVYDITDRGSFEEVLPLKN

SEQ ID NO: 34738 - protein, 70 aa, Homo sapiens
  REGION 1..70: note = ENSP00000441860
MAKSAEVKLAIFGRAGVGKSALVVRFLTKRFIWEYDPTLESTYRHQATIDDEVVSMEILDTAGQVNKEFS

SEQ ID NO: 34739 - protein, 38 aa, Homo sapiens
  REGION 1..38: note = ENSP00000440887
MAKSAEVKLAIFGRAGVGKSALVVRFLTKRFIWEYDPT

SEQ ID NO: 34740 - protein, 1114 aa, Homo sapiens
  REGION 1..1114: note = ENSP00000347942
MAKATSGAAGLRLLLLLLLPLLGKVALGLYFSRDAYWEKLYVDQAAGTPLLYVHALRDAPEEVPSFRLGQHLYGTYRTRLHENNWICIQEDTGLLYLNRSLDHSSWEKLSVRNRGFPLLTVYLKVFLSPTSLREGECQWPGCARVYFSFFNTSFPACSSLKPRELCFPETRPSFRIRENRPPGTFHQFRLLPVQFLCPNISVAYRLLEGEGLPFRCAPDSLEVSTRWALDREQREKYELVAVCTVHAGAREEVVMVPFPVTVYDEDDSAPTFPAGVDTASAVVEFKRKEDTVVATLRVFDADVVPASGELVRRYTSTLLPGDTWAQQTFRVEHWPNETSVQANGSFVRATVHDYRLVLNRNLSISENRTMQLAVLVNDSDFQGPGAGVLLLHFNVSVLPVSLHLPSTYSLSVSRRARRFAQIGKVCVENCQAFSGINVQYKLHSSGANCSTLGVVTSAEDTSGILFVNDTKALRRPKCAELHYMVVATDQQTSRQAQAQLLVTVEGSYVAEEAGCPLSCAVSKRRLECEECGGLGSPTGRCEWRQGDGKGITRNFSTCSPSTKTCPDGHCDVVETQDINICPQDCLRGSIVGGHEPGEPRGIKAGYGTCNCFPEEEKCFCEPEDIQDPLCDELCRTVIAAAVLFSFIVSVLLSAFCIHCYHKFAHKPPISSAEMTFRRPAQAFPVSYSSSGARRPSLDSMENQVSVDAFKILEDPKWEFPRKNLVLGKTLGEGEFGKVVKATAFHLKGRAGYTTVAVKMLKENASPSELRDLLSEFNVLKQVNHPHVIKLYGACSQDGPLLLIVEYAKYGSLRGFLRESRKVGPGYLGSGGSRNSSSLDHPDERALTMGDLISFAWQISQGMQYLAEMKLVHRDLAARNILVAEGRKMKISDFGLSRDVYEEDSYVKRSQGRIPVKWMAIESLFDHIYTTQSDVWSFGVLLWEIVTLGGNPYPGIPPERLFNLLKTGHRMERPDNCSEEMYRLMLQCWKQEPDKRPVFADISKDLEKMMVKRRDYLDLAASTPSDSLIYDDGLSEEETPLVDCNNAPLPRALPSTWIENKLYGMSDPNWPGESPVPLTRADGTNTGFPRYPNDSVYANWMLSPSAAKLMDTFDS

SEQ ID NO: 34741 - protein, 181 aa, Homo sapiens
  REGION 1..181: note = ENSP00000419080
MAKATSGAAGLRLLLLLLLPLLGKDVAEEAGCPLSCAVSKRRLECEECGGLGSPTGRCEWRQGDGKGITRNFSTCSPSTKTCPDGHCDVVETQDINICPQDCLRGSIVGGHEPGEPRGIKAGYGTCNCFPEEEKCFCEPEDIQDPLCDELCRTVIAAAVLFSFIVSVLLSAFCIHCYHKFA

SEQ ID NO: 34742 - protein, 1072 aa, Homo sapiens
  REGION 1..1072: note = ENSP00000344798
MAKATSGAAGLRLLLLLLLPLLGKVALGLYFSRDAYWEKLYVDQAAGTPLLYVHALRDAPEEVPSFRLGQHLYGTYRTRLHENNWICIQEDTGLLYLNRSLDHSSWEKLSVRNRGFPLLTVYLKVFLSPTSLREGECQWPGCARVYFSFFNTSFPACSSLKPRELCFPETRPSFRIRENRPPGTFHQFRLLPVQFLCPNISVAYRLLEGEGLPFRCAPDSLEVSTRWALDREQREKYELVAVCTVHAGAREEVVMVPFPVTVYDEDDSAPTFPAGVDTASAVVEFKRKEDTVVATLRVFDADVVPASGELVRRYTSTLLPGDTWAQQTFRVEHWPNETSVQANGSFVRATVHDYRLVLNRNLSISENRTMQLAVLVNDSDFQGPGAGVLLLHFNVSVLPVSLHLPSTYSLSVSRRARRFAQIGKVCVENCQAFSGINVQYKLHSSGANCSTLGVVTSAEDTSGILFVNDTKALRRPKCAELHYMVVATDQQTSRQAQAQLLVTVEGSYVAEEAGCPLSCAVSKRRLECEECGGLGSPTGRCEWRQGDGKGITRNFSTCSPSTKTCPDGHCDVVETQDINICPQDCLRGSIVGGHEPGEPRGIKAGYGTCNCFPEEEKCFCEPEDIQDPLCDELCRTVIAAAVLFSFIVSVLLSAFCIHCYHKFAHKPPISSAEMTFRRPAQAFPVSYSSSGARRPSLDSMENQVSVDAFKILEDPKWEFPRKNLVLGKTLGEGEFGKVVKATAFHLKGRAGYTTVAVKMLKENASPSELRDLLSEFNVLKQVNHPHVIKLYGACSQDGPLLLIVEYAKYGSLRGFLRESRKVGPGYLGSGGSRNSSSLDHPDERALTMGDLISFAWQISQGMQYLAEMKLVHRDLAARNILVAEGRKMKISDFGLSRDVYEEDSYVKRSQGRIPVKWMAIESLFDHIYTTQSDVWSFGVLLWEIVTLGGNPYPGIPPERLFNLLKTGHRMERPDNCSEEMYRLMLQCWKQEPDKRPVFADISKDLEKMMVKRRDYLDLAASTPSDSLIYDDGLSEEETPLVDCNNAPLPRALPSTWIENKLYGRISHAFTRF

SEQ ID NO: 34743 - protein, 114 aa, Homo sapiens
  REGION 1..114: note = ENSP00000491505
  VARIANT 1: note = Any amino acid
XDAYWEKLYVDQAAGTPLLYVHALRDAPEEVPSFRLGQHLYGTYRTRLHENNWICIQEDTGLLYLNRSLDHSSWEKLSVRNVADAPTDLTSLCRPRLSPAHRLPQGLPVTHIPS

SEQ ID NO: 34744 - protein, 191 aa, Homo sapiens
  REGION 1..191: note = ENSP00000492728
  VARIANT 1: note = Any amino acid
XDAYWEKLYVDQAAGTPLLYVHALRDAPEEVPSFRLGQHLYGTYRTRLHENNWICIQEDTGLLYLNRSLDHSSWEKLSVRTCSSLKPRELCFPETRPSFRIRENRPPGTFHQFRLLPVQFLCPNISVAYRLLEGECRPCGAAPQCLLLLVLLCEPLTQAIWFILHLHAISSFNIPEVPLACLPGARYCSRS

SEQ ID NO: 34745 - protein, 458 aa, Homo sapiens
  REGION 1..458: note = ENSP00000480088
MAKATSGAAGLRLLLLLLLPLLGKVALGLYFSRDAYWEKLYVDQAAGTPLLYVHALRDAPEEVPSFRLGQHLYGTYRTRLHENNWICIQEDTGLLYLNRSLDHSSWEKLSVRNRGFPLLTVYLKVFLSPTSLREGECQWPGCARVYFSFFNTSFPACSSLKPRELCFPETRPSFRIRENRPPGTFHQFRLLPVQFLCPNISVAYRLLEGEGLPFRCAPDSLEVSTRWALDREQREKYELVAVCTVHAGAREEVVMVPFPVTVYDEDDSAPTFPAGVDTASAVVEFKRKEDTVVATLRVFDADVVPASGELVRRYTSTLLPGDTWAQQTFRVEHWPNETSVQANGSFVRATVHDYRLVLNRNLSISENRTMQLAVLVNDSDFQGPGAGVLLLHFNVSVLPVSLHLPSTYSLSVSRRARRFAQIGKVCVENCLADLTGDAVSGRDEARSSGLGSQKHPGS

SEQ ID NO: 34746 - protein, 88 aa, Homo sapiens
  REGION 1..88: note = ENSP00000475367
VQTDYVPLLNSLAAYGWQLTCVLPTPVVKTTSEGSVSTKQIVFLQRPCLPQKIKKKESKFQWRFSREEMHNRQMRKSKVTYGNKSSMS

SEQ ID NO: 34747 - protein, 542 aa, Homo sapiens
  REGION 1..542: note = ENSP00000403926
MYCDGAVDLDAAAELPGSSAVRLASLRDLPAQLLELYQQGFSLAALHPFVQPTHEREKTPLEHIFRAILIKKTDRSQKTDLHNEGYILELDCCSSLDHPTDQKLIPEFIKKIQEAASQGLKFVGVIPQYHSSVNSAGSSAPVSTANSTEDARDAKNARGDHASLENEKPGTGDVCSAPAGRNQSPEPSSGPRGEVPLAKQPSSPSGEGDGGELSPQGVSKTLDGPESNPLEVHEEPLSGKMEIFTLFNKPKSHQKCRQYYPVTIPLHVSKNGQTVSGLDANWLEHMSDHFRKGGMLVNAVFYLGIVNDSLHGLTDGVFIFEAVSTEDSKTIQGYDAIVVEQWTVLEGVEVQTDYVPLLNSLAAYGWQLTCVLPTPVVKTTSEGSVSTKQIVFLQRPCLPQKIKKKESKFQWRFSREEMHNRQMRKSKGKLSARDKQQAEENEKNLEDQSSKAGDMGNCVSGQQQEGGVSEEMKGPVQEDKGEQLSPGGLLCGVGVEGEAVQNGPASHSRALVGICTGHSNPGEDARDGDAEEVRELGTVEEN

SEQ ID NO: 34748 - protein, 578 aa, Homo sapiens
  REGION 1..578: note = ENSP00000334153
MGCGLNKLEKRDEKRPGNIYSTLKRPQVETKIDVSYEYRFLEFTTLSAAELPGSSAVRLASLRDLPAQLLELYQQGFSLAALHPFVQPTHEREKTPLEHIFRAILIKKTDRSQKTDLHNEGYILELDCCSSLDHPTDQKLIPEFIKKIQEAASQGLKFVGVIPQYHSSVNSAGSSAPVSTANSTEDARDAKNARGDHASLENEKPGTGDVCSAPAGRNQSPEPSSGPRGEVPLAKQPSSPSGEGDGGELSPQGVSKTLDGPESNPLEVHEEPLSGKMEIFTLFNKPKSHQKCRQYYPVTIPLHVSKNGQTVSGLDANWLEHMSDHFRKGGMLVNAVFYLGIVNDSLHGLTDGVFIFEAVSTEDSKTIQGYDAIVVEQWTVLEGVEVQTDYVPLLNSLAAYGWQLTCVLPTPVVKTTSEGSVSTKQIVFLQRPCLPQKIKKKESKFQWRFSREEMHNRQMRKSKGKLSARDKQQAEENEKNLEDQSSKAGDMGNCVSGQQQEGGVSEEMKGPVQEDKGEQLSPGGLLCGVGVEGEAVQNGPASHSRALVGICTGHSNPGEDARDGDAEEVRELGTVEEN

SEQ ID NO: 34749 - protein, 275 aa, Homo sapiens
  REGION 1..275: note = ENSP00000403997
MGCGLNKLEKRDEKRPGNIYSTLKRPQVETKIDVSYEYRFLEFTTLSAAELPGSSAVRLASLRDLPAQLLELYQQGFSLAALHPFVQPTHEREKTPLEHIFRAILIKKTDRSQKTDLHNEGYILELDCCSSLDHPTDQKLIPEFIKKIQEAASQGLKFVGVIPQYHSSVNSAGSSAPVSTANSTEDARDAKNARGDHASLENEKPGTGDVCSAPAGRNQSPEPSSGPRGEVPLAKQPSSPSGEGDGGELSPQGVSKTLDGPESNPLEVHEEPLSG

SEQ ID NO: 34750 - protein, 149 aa, Homo sapiens
  REGION 1..149: note = ENSP00000409427
MGCGLNKLEKRDEKRPGNIYSTLKRPQVETKIDVSYEYRFLEFTTLSAAELPGSSAVRLASLRDLPAQLLELYQQGFSLAALHPFVQPTHEREKTPLEHIFRAILIKKTDRSQKTDLHNEGYILELDCCSSLDHPTDQKLIPEFIKKIQ

SEQ ID NO: 34751 - protein, 149 aa, Homo sapiens; identical to SEQ ID NO: 34750
  REGION 1..149: note = ENSP00000388718

SEQ ID NO: 34752 - protein, 117 aa, Homo sapiens
  REGION 1..117: note = ENSP00000410493
MGCGLNKLEKRDEKRPGNIYSTLKRPQVETKIDVSYEYRFLEFTTLSAAELPGSSAVRLASLRDLPAQLLELYQQGFSLAALHPFVQPTHEREKTPLEHIFRAILIKKTDRKSHLCQ

SEQ ID NO: 34753 - protein, 114 aa, Homo sapiens
  REGION 1..114: note = ENSP00000393216
MGCGLNKLEKRDEKRPGNIYSTLKRPQVETKIDVSYEYRFLEFTTLSAAELPGSSAVRLASLRDLPAQLLELYQQGFSLAALHPFVQPTHEREKTPLEHIFRAILIKKTDRSQK

SEQ ID NO: 34754 - protein, 735 aa, Homo sapiens
  REGION 1..735: note = ENSP00000376585
MHCGLLEEPDMDSTESWIERCLNESENKRYSSHTSLGNVSNDENEEKENNRASKPHSTPATLQWLEENYEIAEGVCIPRSALYMHYLDFCEKNDTQPVNAASFGKIIRQQFPQLTTRRLGTRGQSKYHYYGIAVKESSQYYDVMYSKKGAAWVSETGKKEVSKQTVAYSPRSKLGTLLPEFPNVKDLNLPASLPEEKVSTFIMMYRTHCQRILDTVIRANFDEVQSFLLHFWQGMPPHMLPVLGSSTVVNIVGVCDSILYKAISGVLMPTVLQALPDSLTQVIRKFAKQLDEWLKVALHDLPENLRNIKFELSRRFSQILRRQTSLNHLCQASRTVIHSADITFQMLEDWRNVDLNSITKQTLYTMEDSRDEHRKLITQLYQEFDHLLEEQSPIESYIEWLDTMVDRCVVKVAAKRQGSLKKVAQQFLLMWSCFGTRVIRDMTLHSAPSFGSFHLIHLMFDDYVLYLLESLHCQERANELMRAMKGEGSTAEVREEIILTEAAAPTPSPVPSFSPAKSATSVEVPPPSSPVSNPSPEYTGLSTTGAMQSYTWSLTYTVTTAAGSPAENSQQLPCMRNTHVPSSSVTHRIPVYPHREEHGYTGSYNYGSYGNQHPHPMQSQYPALPHDTAISGPLHYAPYHRSSAQYPFNSPTSRMEPCLMSSTPRLHPTPVTPRWPEVPSANTCYTSPSVHSARYGNSSDMYTPLTTRRNSEYEHMQHFPGFAYINGEASTGWAK

SEQ ID NO: 34755 - protein, 77 aa, Homo sapiens
  REGION 1..77: note = ENSP00000447423
MHCGLLEEPDMDSTDEEKENNRASKPHSTPATLQWLEENYEIAEGVCIPRSALYMHYLDFCEKNDTQPVNAASFGKQ

SEQ ID NO: 34756 - protein, 59 aa, Homo sapiens
  REGION 1..59: note = ENSP00000447735
MHYLDFCEKNDTQPVNAASFGKIIRQQFPQLTTRRLGTRGQSKYHYYGIAVKESSQYYD

SEQ ID NO: 34757 - protein, 145 aa, Homo sapiens
  REGION 1..145: note = ENSP00000473326
MPPHMLPVLGSSTVVNIVGVCDSILYKAISGVLMPTVLQALPDSLTQVIRKFAKQLDEWLKVALHDLPENLRNIKFELSRRFSQILRRQTSLNHLCQASRTVIHSADITFQMLEDWRNVDLNSITKQTLYTMEDSRDEHRKLITQ

SEQ ID NO: 34758 - protein, 744 aa, Homo sapiens
  REGION 1..744: note = ENSP00000350552
MIKRRAHPGAGGDRTRPRRRRSTESWIERCLNESENKRYSSHTSLGNVSNDENEEKENNRASKPHSTPATLQWLEENYEIAEGVCIPRSALYMHYLDFCEKNDTQPVNAASFGKIIRQQFPQLTTRRLGTRGQSKYHYYGIAVKESSQYYDVMYSKKGAAWVSETGKKEVSKQTVAYSPRSKLGTLLPEFPNVKDLNLPASLPEEKVSTFIMMYRTHCQRILDTVIRANFDEVQSFLLHFWQGMPPHMLPVLGSSTVVNIVGVCDSILYKAISGVLMPTVLQALPDSLTQVIRKFAKQLDEWLKVALHDLPENLRNIKFELSRRFSQILRRQTSLNHLCQASRTVIHSADITFQMLEDWRNVDLNSITKQTLYTMEDSRDEHRKLITQLYQEFDHLLEEQSPIESYIEWLDTMVDRCVVKVAAKRQGSLKKVAQQFLLMWSCFGTRVIRDMTLHSAPSFGSFHLIHLMFDDYVLYLLESLHCQERANELMRAMKGEGSTAEVREEIILTEAAAPTPSPVPSFSPAKSATSVEVPPPSSPVSNPSPEYTGLSTTGAMQSYTWSLTYTVTTAAGSPAENSQQLPCMRNTHVPSSSVTHRIPVYPHREEHGYTGSYNYGSYGNQHPHPMQSQYPALPHDTAISGPLHYAPYHRSSAQYPFNSPTSRMEPCLMSSTPRLHPTPVTPRWPEVPSANTCYTSPSVHSARYGNSSDMYTPLTTRRNSEYEHMQHFPGFAYINGEASTGWAK

SEQ ID NO: 34759 - protein, 247 aa, Homo sapiens
  REGION 1..247: note = ENSP00000444163
MIKRRAHPGAGGDRTRPRRRRSTESWIERCLNESENKRYSSHTSLGNVSNDENEEKENNRASKPHSTPATLQWLEENYEIAEGVCIPRSALYMHYLDFCEKNDTQPVNAASFGKIIRQQFPQLTTRRLGTRGQSKYHYYGIAVKESSQYYDVMYSKKGAAWVSETGKKEVSKQTVAYSPRSKLGTLLPEFPNVKDLNLPASLPEEKVSTFIMMYRTHCQRILDTVIRANFDEECRPTCCLCWAPPRW

SEQ ID NO: 34760 - protein, 256 aa, Homo sapiens
  REGION 1..256: note = ENSP00000448694
MTSATDGERLEENYEIAEGVCIPRSALYMHYLDFCEKNDTQPVNAASFGKIIRQQFPQLTTRRLGTRGQSKYHYYGIAVKESSQYYDVMYSKKGAAWVSETGKKEVSKQTVAYSPRSKLGTLLPEFPNVKDLNLPASLPEEKVSTFIMMYRTHCQRILDTVIRANFDEVQSFLLHFWQGMPPHMLPVLGSSTVVNIVGVCDSILYKAISGVLMPTVLQALPDSLTQVIRKFAKQLDEWLKVALHDLPENLRNIKFE

SEQ ID NO: 34761 - protein, 641 aa, Homo sapiens
  REGION 1..641: note = ENSP00000229387
MNWAAFGGSEFFIPEGIQIDSRCPLSRNITEWYHYYGIAVKESSQYYDVMYSKKGAAWVSETGKKEVSKQTVAYSPRSKLGTLLPEFPNVKDLNLPASLPEEKVSTFIMMYRTHCQRILDTVIRANFDEVQSFLLHFWQGMPPHMLPVLGSSTVVNIVGVCDSILYKAISGVLMPTVLQALPDSLTQVIRKFAKQLDEWLKVALHDLPENLRNIKFELSRRFSQILRRQTSLNHLCQASRTVIHSADITFQMLEDWRNVDLNSITKQTLYTMEDSRDEHRKLITQLYQEFDHLLEEQSPIESYIEWLDTMVDRCVVKVAAKRQGSLKKVAQQFLLMWSCFGTRVIRDMTLHSAPSFGSFHLIHLMFDDYVLYLLESLHCQERANELMRAMKGEGSTAEVREEIILTEAAAPTPSPVPSFSPAKSATSVEVPPPSSPVSNPSPEYTGLSTTGAMQSYTWSLTYTVTTAAGSPAENSQQLPCMRNTHVPSSSVTHRIPVYPHREEHGYTGSYNYGSYGNQHPHPMQSQYPALPHDTAISGPLHYAPYHRSSAQYPFNSPTSRMEPCLMSSTPRLHPTPVTPRWPEVPSANTCYTSPSVHSARYGNSSDMYTPLTTRRNSEYEHMQHFPGFAYINGEASTGWAK

SEQ ID NO: 34762 - protein, 39 aa, Homo sapiens
  REGION 1..39: note = ENSP00000449732
MNWAAFGGSEFFIPEGIQIDSRCPLSRNITECERKLPIL

SEQ ID NO: 34763 - protein, 137 aa, Homo sapiens
  REGION 1..137: note = ENSP00000368664
MKPPAAQGSPAAAAAAAPALDSAAAEDLSDALCEFDAVLADFASPFHERHFHYEEHLERMKRRSSASVSDSSGFSDSESADSLYRNSFSFSDEKLNSPTDSTPALLSATVTPQKAKLGDTKELEAFIADLDKTLASM

SEQ ID NO: 34764 - protein, 411 aa, Homo sapiens
  REGION 1..411: note = ENSP00000457408
METPEVPVGSLIDFGPEAPTSSPLEAPPPVLQDGDGSLGDGASESETTESADSENDMGESPSHPSWDQDRRSSSNESFSSNQSTESTQDEETLALRDFMRGYVEKIFSGGEDLDQEEKAKFGEYCSSENGKGREWFARYVSAQRCNSKCVSEATFYRLVQSFAVVLFECHQMDDFGPAKNLMTMCFTYYHIGKPQLLPPESREKPAGSIDSYLKSANSWLAEKKDIAERLLKNTSARTENVKGFFGGLETKLKGPLARRNEEDENKPQEKRPRAVTAYSPEDEKKGEKIYLYTHLKQQPIWHTLRFWNAAFFDAVHCERTKRSPTTRGDAGEEEEKREKWCHMTQEERDDSLRFNENITFGQLGTFTHNMLAFGLNKKLCNDFLKKQAVIGNLDEEQYKLLSDHIEQMATE

SEQ ID NO: 34765 - protein, 301 aa, Homo sapiens
  REGION 1..301: note = ENSP00000455544
METPEVPVGSLIDFGPEAPTSSPLEAPPPVLQDGDGSLGDGASESETTESADSENDMGESPSHPSWDQDRRSSSNESFSSNQSTESTQDEETLALRDFMRGYVEKIFSGGEDLDQEEKAKFGEYCSSENGKGREWFARYVSAQRCNSKCVSEATFYRLVQSFAVVLFECHQMDDFGPAKNLMTMCFTYYHIGKPQLLPPESREKPAGSIDSYLKSANSWLAEKKDIAERLLKNTSARTENVKGFFGGLETKLKGPLARRNEEDENKPQEKRPRAVTAYSPEDEKKGEKIYLYTHLKQQPIW

SEQ ID NO: 34766 - protein, 198 aa, Homo sapiens
  REGION 1..198: note = ENSP00000454547
KPAGSIDSYLKSANSWLAEKKDIAERLLKNTSARTENVKGFFGGLETKLKGPLARRNEEDENKPQEKRPRAVTAYSPEDEKKGEKIYLYTHLKQQPIWHTLRFWNAAFFDAVHCERTKRSPTTREKWCHMTQEERDDSLRFNENITFGQLGTFTHNMLAFGLNKKLCNDFLKKQAVIGNLDEEQYKLLSDHIEQMATE

SEQ ID NO: 34767 - protein, 113 aa, Homo sapiens
  REGION 1..113: note = ENSP00000454758
DENKPQEKRPRAVTAYSPEDEKKGEKIYLYTHLKQQPIWEKWCHMTQEERDDSLRFNENITFGQLGTFTHNMLAFGLNKKLCNDFLKKQAVIGNLDEEQYKLLSDHIEQMATE

SEQ ID NO: 34768 - protein, 411 aa, Homo sapiens; identical to SEQ ID NO: 34764
  REGION 1..411: note = ENSP00000258180

SEQ ID NO: 34769 - protein, 401 aa, Homo sapiens
  REGION 1..401: note = ENSP00000446439
METPEVPVGSLIDFGPEAPTSSPLEAPPPVLQDGDGSLGDGASESETTESADSENDMGESPSHPSWDQDRRSSSNESFSSNQSTESTQDEETLALRDFMRGYVEKIFSGGEDLDQEEKAKFGEYCSSENGKGREWFARYVSAQRCNSKCVSEATFYRLVQSFAVVLFECHQMDDFGPAKNLMTMCFTYYHIGKPQLLPPESREKPAGSIDSYLKSANSWLAEKKDIAERLLKNTSARTENVKGFFGGLETKLKGPLARRNEEDENKPQEKRPRAVTAYSPEDEKKGEKIYLYTHLKQQPIWHTLRFWNAAFFDAVHCERTKRSPTTREKWCHMTQEERDDSLRFNENITFGQLGTFTHNMLAFGLNKKLCNDFLKKQAVIGNLDEEQYKLLSDHIEQMATE

SEQ ID NO: 34770 - protein, 250 aa, Homo sapiens
  REGION 1..250: note = ENSP00000454678
  VARIANT 1: note = Any amino acid
XRTAGKELALAPLQDWGEETEDGAVYSVSLRRQRSQRRSPAEGPGGSQAPSPIANTFLHYRTSKVRVLRAARLERLVGELVFGDREQDPSFMPAFLATYRTFVPTACLLGFLLPPMPPPPPPGVEIKKTAVQDLSFNKNLRAVVSVLGSWLQDHPQDFRDHPAHSDLGSVRTFLGWAAPGSAEAQKAEKLLEDFLEEAEREQEEEPPQDLPELPKLLTQTLQRPARRKRKGSCLKVPSSWTSAWTRWPSS

SEQ ID NO: 34771 - protein, 181 aa, Homo sapiens
  REGION 1..181: note = ENSP00000455922
MERTAGKELALAPLQDWGEETEDGAVYSVSLRRQRSQRRSPAEGPGGSQAPSPIANTFLHYRTSKVRVLRAARLERLVGELVFGDREQDPSFMPAFLATYRTFVPTACLLGFLLPPMPPPPPPGDQEDSGTRSELQQEPEGCGVSAGLLAAGPPSGFPRPPCPFGPGQCPNLSGLGGPREC

SEQ ID NO: 34772 - protein, 710 aa, Homo sapiens
  REGION 1..710: note = ENSP00000369823
MERTAGKELALAPLQDWGEETEDGAVYSVSLRRQRSQRRSPAEGPGGSQAPSPIANTFLHYRTSKVRVLRAARLERLVGELVFGDREQDPSFMPAFLATYRTFVPTACLLGFLLPPMPPPPPPGVEIKKTAVQDLSFNKNLRAVVSVLGSWLQDHPQDFRDHPAHSDLGSVRTFLGWAAPGSAEAQKAEKLLEDFLEEAEREQEEEPPQVWTGPPRVAQTSDPDSSEACAEEEEGLMPQGPQLLDFSVDEVAEQLTLIDLELFSKVRLYECLGSVWSQRDRPGAAGASPTVRATVAQFNTVTGCVLGSVLGAPGLAAPQRAQRLEKWIRIAQRCRELRNFSSLRAILSALQSNPIYRLKRSWGAVSREPLSTFRKLSQIFSDENNHLSSREILFQEEATEGSQEEDNTPGSLPSKPPPGPVPYLGTFLTDLVMLDTALPDMLEGDLINFEKRRKEWEILARIQQLQRRCQSYTLSPHPPILAALHAQNQLTEEQSYRLSRVIEPPAASCPSSPRIRRRISLTKRLSAKLAREKSSSPSGSPGDPSSPTSSVSPGSPPSSPRSRDAPAGSPPASPGPQGPSTKLPLSLDLPSPRPFALPLGSPRIPLPAQQSSEARVIRVSIDNDHGNLYRSILLTSQDKAPSVVRRALQKHNVPQPWACDYQLFQVLPGDRVLLIPDNANVFYAMSPVAPRDFMLRRKEGTRNTLSVSPS

SEQ ID NO: 34773 - protein, 716 aa, Homo sapiens
  REGION 1..716: note = ENSP00000377075
MERTAGKELALAPLQDWGEETEDGAVYSVSLRRQRSQRRSPAEGPGGSQAPSPIANTFLHYRTSKVRVLRAARLERLVGELVFGDREQDPSFMPAFLATYRTFVPTACLLGFLLPPMPPPPPPGVEIKKTAVQDLSFNKNLRAVVSVLGSWLQDHPQDFRDHPAHSDLGSVRTFLGWAAPGSAEAQKAEKLLEDFLEEAEREQEEEPPQVWTGPPRVAQTSDPDSSEACAEEEEGLMPQGPQLLDFSVDEVAEQLTLIDLELFSKVRLYECLGSVWSQRDRPGAAGASPTVRATVAQFNTVTGCVLGSVLGAPGLAAPQRAQRLEKWIRIAQRCRELRNFSSLRAILSALQSNPIYRLKRSWGAVSREPLSTFRKLSQIFSDENNHLSSREILFQEEATEGSQEEDNTPGSLPSKPPPGPVPYLGTFLTDLVMLDTALPDMLEGDLINFEKRRKEWEILARIQQLQRRCQSYTLSPHPPILAALHAQNQLTEEQSYRLSRVIEPPAASCPSSPRIRRRISLTKRLSAKLAREKSSSPSGSPGDPSSPTSSLCISPSVSPGSPPSSPRSRDAPAGSPPASPGPQGPSTKLPLSLDLPSPRPFALPLGSPRIPLPAQQSSEARVIRVSIDNDHGNLYRSILLTSQDKAPSVVRRALQKHNVPQPWACDYQLFQVLPGDRVLLIPDNANVFYAMSPVAPRDFMLRRKEGTRNTLSVSPS

SEQ ID NO: 34774 - protein, 77 aa, Homo sapiens
  REGION 1..77: note = ENSP00000466669
  VARIANT 1: note = Any amino acid
XLGSVWSQRDRPGAAGASPTVRATVAQFNTVTGCVLGSVLGAPGLAAPQRAQRLEKWIRIAQGTAIYFQETFADFLR

SEQ ID NO: 34775 - protein, 176 aa, Homo sapiens
  REGION 1..176: note = ENSP00000464876
MRRPGRKGTGGGQAPSPIANTFLHYRTSKVRVLRAARLERLVGELVFGDREQDPSFMPAFLATYRTFVPTACLLGFLLPPMPPPPPPGVEIKKTAVQDLSFNKNLRAVVSVLGSWLQDHPQDFRDHPAHSDLGSVRTFLGWAAPGSAEAQKAEKLLEDFLEEAEREQEEEPPQVWT

SEQ ID NO: 34776 - protein, 167 aa, Homo sapiens
  REGION 1..167: note = ENSP00000456429
MERTAGKELALAPLQDWGEETEDGAVYSVSLRRQRSQRRSPAEGPGGSQAPSPIANTFLHYRTSKVRVLRAARLERLVGELVFGDREQDPSFMPAFLATYRTFVPTACLLGFLLPPMPPPPPPGVEIKKTAVQDLSFNKNLRTTLRISETTLPIRTWAVSEPFWAGR

SEQ ID NO: 34777 - protein, 450 aa, Homo sapiens
  REGION 1..450: note = ENSP00000330005
MQPPRERLVVTGRAGWMGMGRGAGRSALGFWPTLAFLLCSFPAATSPCKILKCNSEFWSATSGSHAPASDDTPEFCAALRSYALCTRRTARTCRGDLAYHSAVHGIEDLMSQHNCSKDGPTSQPRLRTLPPAGDSQERSDSPEICHYEKSFHKHSATPNYTHCGLFGDPHLRTFTDRFQTCKVQGAWPLIDNNYLNVQVTNTPVLPGSAATATSKLTIIFKNFQECVDQKVYQAEMDELPAAFVDGSKNGGDKHGANSLKITEKVSGQHVEIQAKYIGTTIVVRQVGRYLTFAVRMPEEVVNAVEDWDSQGLYLCLRGCPLNQQIDFQAFHTNAEGTGARRLAAASPAPTAPETFPYETAVAKCKEKLPVEDLYYQACVFDLLTTGDVNFTLAAYYALEDVKMLHSNKDKLHLYERTRDLPGRAAAGLPLAPRPLLGALVPLLALLPVFC

SEQ ID NO: 34778 - protein, 434 aa, Homo sapiens
  REGION 1..434: note = ENSP00000440025
MGMGRGAGRSALGFWPTLAFLLCSFPAATSPCKILKCNSEFWSATSGSHAPASDDTPEFCAALRSYALCTRRTARTCRGDLAYHSAVHGIEDLMSQHNCSKDGPTSQPRLRTLPPAGDSQERSDSPEICHYEKSFHKHSATPNYTHCGLFGDPHLRTFTDRFQTCKVQGAWPLIDNNYLNVQVTNTPVLPGSAATATSKLTIIFKNFQECVDQKVYQAEMDELPAAFVDGSKNGGDKHGANSLKITEKVSGQHVEIQAKYIGTTIVVRQVGRYLTFAVRMPEEVVNAVEDWDSQGLYLCLRGCPLNQQIDFQAFHTNAEGTGARRLAAASPAPTAPETFPYETAVAKCKEKLPVEDLYYQACVFDLLTTGDVNFTLAAYYALEDVKMLHSNKDKLHLYERTRDLPGRAAAGLPLAPRPLLGALVPLLALLPVFC

SEQ ID NO: 34779 - protein, 61 aa, Homo sapiens
  REGION 1..61: note = ENSP00000451505
MGMGRGAGRSALGFWPTLAFLLCSFPAAIKRSPGSFCAALEMRRLWNLMSWKERRVQKPLM

SEQ ID NO: 34780 - protein, 458 aa, Homo sapiens
  REGION 1..458: note = ENSP00000452126
MGGLGPRRAGTSRERLVVTGRAGWMGMGRGAGRSALGFWPTLAFLLCSFPAATSPCKILKCNSEFWSATSGSHAPASDDTPEFCAALRSYALCTRRTARTCRGDLAYHSAVHGIEDLMSQHNCSKDGPTSQPRLRTLPPAGDSQERSDSPEICHYEKSFHKHSATPNYTHCGLFGDPHLRTFTDRFQTCKVQGAWPLIDNNYLNVQVTNTPVLPGSAATATSKLTIIFKNFQECVDQKVYQAEMDELPAAFVDGSKNGGDKHGANSLKITEKVSGQHVEIQAKYIGTTIVVRQVGRYLTFAVRMPEEVVNAVEDWDSQGLYLCLRGCPLNQQIDFQAFHTNAEGTGARRLAAASPAPTAPETFPYETAVAKCKEKLPVEDLYYQACVFDLLTTGDVNFTLAAYYALEDVKMLHSNKDKLHLYERTRDLPGRAAAGLPLAPRPLLGALVPLLALLPVFC

SEQ ID NO: 34781 - protein, 46 aa, Homo sapiens
  REGION 1..46: note = ENSP00000452170
MGMGRGAGRSALGFWPTLAFLLCSFPAAHHHLQELPGVCGPEGVPG

SEQ ID NO: 34782 - protein, 341 aa, Homo sapiens
  REGION 1..341: note = ENSP00000456290
MSQHNCSKDGPTSQPRLRTLPPAGDSQERSDSPEICHYEKSFHKHSATPNYTHCGLFGDPHLRTFTDRFQTCKVQGAWPLIDNNYLNVQVTNTPVLPGSAATATSKLTIIFKNFQECVDQKVYQAEMDELPAAFVDGSKNGGDKHGANSLKITEKVSGQHVEIQAKYIGTTIVVRQVGRYLTFAVRMPEEVVNAVEDWDSQGLYLCLRGCPLNQQIDFQAFHTNAEGTGARRLAAASPAPTAPETFPYETAVAKCKEKLPVEDLYYQACVFDLLTTGDVNFTLAAYYALEDVKMLHSNKDKLHLYERTRDLPGRAAAGLPLAPRPLLGALVPLLALLPVFC

SEQ ID NO: 34783 - protein, 90 aa, Homo sapiens
  REGION 1..90: note = ENSP00000451709
MGMGRGAGRSALGFWPTLAFLLCSFPAATSPCKILKCNSEFWSATSGSHAPASDDTPEFCAALRSYALCTRRTARTCRGDLAYHSAVHGI

SEQ ID NO: 34784 - protein, 10 aa, Homo sapiens
  REGION 1..10: note = ENSP00000452350
MGMGRGAGRS

SEQ ID NO: 34785 - protein, 434 aa, Homo sapiens; identical to SEQ ID NO: 34778
  REGION 1..434: note = ENSP00000404442

SEQ ID NO: 34786 - protein, 434 aa, Homo sapiens; identical to SEQ ID NO: 34778
  REGION 1..434: note = ENSP00000442498

SEQ ID NO: 34787 - protein, 478 aa, Homo sapiens
  REGION 1..478: note = ENSP00000308219
MIRKKRKRSAPPGPCRSHGPRPATAPAPPPSPEPTRPAWTGMGLRAAPSSAAAAAAEVEQRRSPGLCPPPLELLLLLLFSLGLLHAGDCQQPAQCRIQKCTTDFVSLTSHLNSAVDGFDSEFCKALRAYAGCTQRTSKACRGNLVYHSAVLGISDLMSQRNCSKDGPTSSTNPEVTHDPCNYHSHAGAREHRRGDQNPPSYLFCGLFGDPHLRTFKDNFQTCKVEGAWPLIDNNYLSVQVTNVPVVPGSSATATNKITIIFKAHHECTDQKVYQAVTDDLPAAFVDGTTSGGDSDAKSLRIVERESGHYVEMHARYIGTTVFVRQVGRYLTLAIRMPEDLAMSYEESQDLQLCVNGCPLSERIDDGQGQVSAILGHSLPRTSLVQAWPGYTLETANTQCHEKMPVKDIYFQSCVFDLLTTGDANFTAAAHSALEDVEALHPRKERWHIFPSSGNGTPRGGSDLSVSLGLTCLILIVFL

SEQ ID NO: 34788 - protein, 437 aa, Homo sapiens
  REGION 1..437: note = ENSP00000423256
MGLRAAPSSAAAAAAEVEQRRSPGLCPPPLELLLLLLFSLGLLHAGDCQQPAQCRIQKCTTDFVSLTSHLNSAVDGFDSEFCKALRAYAGCTQRTSKACRGNLVYHSAVLGISDLMSQRNCSKDGPTSSTNPEVTHDPCNYHSHAGAREHRRGDQNPPSYLFCGLFGDPHLRTFKDNFQTCKVEGAWPLIDNNYLSVQVTNVPVVPGSSATATNKITIIFKAHHECTDQKVYQAVTDDLPAAFVDGTTSGGDSDAKSLRIVERESGHYVEMHARYIGTTVFVRQVGRYLTLAIRMPEDLAMSYEESQDLQLCVNGCPLSERIDDGQGQVSAILGHSLPRTSLVQAWPGYTLETANTQCHEKMPVKDIYFQSCVFDLLTTGDANFTAAAHSALEDVEALHPRKERWHIFPSSGNGTPRGGSDLSVSLGLTCLILIVFL

SEQ ID NO: 34789 - protein, 202 aa, Homo sapiens
  REGION 1..202: note = ENSP00000356529
MCRTLAAFPTTCLERAKEFKTRLGIFLHKSELGCDTGSTGKFEWGSKHSKENRNFSEDVLGWRESFDLLLSSKNGVAAFHAFLKTEFSEENLEFWLACEEFKKIRSATKLASRAHQIFEEFICSEAPKEVNIDHETHELTRMNLQTATATCFDAAQGKTRTLMEKDSYPRFLKSPAYRDLAAQASAASATLSSCSLDEPSHT

SEQ ID NO: 34790 - protein, 211 aa, Homo sapiens
  REGION 1..211: note = ENSP00000235382
MQSAMFLAVQHDCRPMDKSAGSGHKSEEKREKMKRTLLKDWKTRLSYFLQNSSTPGKPKTGKKSKQQAFIKPSPEEAQLWSEAFDELLASKYGLAAFRAFLKSEFCEENIEFWLACEDFKKTKSPQKLSSKARKIYTDFIEKEAPKEINIDFQTKTLIAQNIQEATSGCFTTAQKRVYSLMENNSYPRFLESEFYQDLCKKPQITTEPHAT

SEQ ID NO: 34791 - protein, 388 aa, Homo sapiens
  REGION 1..388: note = ENSP00000297313
MPQLSQDNQECLQKHFSRPSIWTQFLPLFRAQRYNTDIHQITENEGDLRAVPDIKSFPPAQLPDSPAAPKLFGLLSSPLSSLARFFSHLLRRPPPEAPRRRLDFSPLLPALPAARLSRGHEELPGRLSLLLGAALALPGRPSGGRPLRPPHPVAKPREEDATAGQSSPMPQMGSERMEMRKRQMPAAQDTPGAAPGQPGAGSRGSNACCFCWCCCCSCSCLTVRNQEDQRPTIASHELRADLPTWEESPAPTLEEVNAWAQSFDKLMVTPAGRNAFREFLRTEFSEENMLFWMACEELKKEANKNIIEEKARIIYEDYISILSPKEVSLDSRVREVINRNMVEPSQHIFDDAQLQIYTLMHRDSYPRFMNSAVYKDLLQSLSEKSIEA

SEQ ID NO: 34792 - protein, 58 aa, Homo sapiens
  REGION 1..58: note = ENSP00000428795
MPQLSQDNQECLQKHFSRPSIWTQFLPLFRAQRYNTDIHQITENEGDLRAVPDIKSHC

SEQ ID NO: 34793 - protein, 273 aa, Homo sapiens
  REGION 1..273: note = ENSP00000344630
MPQLSQDNQECLQKHFSRPSIWTQFLPLFRAQRYNTDIHQITENEGDLRAVPDIKQMGSERMEMRKRQMPAAQDTPGAAPGQPGAGSRGSNACCFCWCCCCSCSCLTVRNQEDQRPTIASHELRADLPTWEESPAPTLEEVNAWAQSFDKLMVTPAGRNAFREFLRTEFSEENMLFWMACEELKKEANKNIIEEKARIIYEDYISILSPKEVSLDSRVREVINRNMVEPSQHIFDDAQLQIYTLMHRDSYPRFMNSAVYKDLLQSLSEKSIEA

SEQ ID NO: 34794 - protein, 70 aa, Homo sapiens
  REGION 1..70: note = ENSP00000429897
MPQLSQDNQECLQKHFSRPSIWTQFLPLFRAQRYNTDIHQITENEGDLRAVPDIKPCSYSGRSQRLGSVI

SEQ ID NO: 34795 - protein, 122 aa, Homo sapiens
  REGION 1..122: note = ENSP00000430627
MVTPAGRNAFREFLRTEFSEENMLFWMACEELKKEANKNIIEEKARIIYEDYISILSPKEVSLDSRVREVINRNMVEPSQHIFDDAQLQIYTLMHRDSYPRFMNSAVYKDLLQSLSEKSIEA

SEQ ID NO: 34796 - protein, 241 aa, Homo sapiens
  REGION 1..241: note = ENSP00000276500
MRTADGGEPAGASSPAGRVDGGLQMGSERMEMRKRQMPAAQDTPGAAPGQPGAGSRGSNACCFCWCCCCSCSCLTVRNQEDQRPTIASHELRADLPTWEESPAPTLEEVNAWAQSFDKLMVTPAGRNAFREFLRTEFSEENMLFWMACEELKKEANKNIIEEKARIIYEDYISILSPKEVSLDSRVREVINRNMVEPSQHIFDDAQLQIYTLMHRDSYPRFMNSAVYKDLLQSLSEKSIEA

SEQ ID NO: 34797 - protein, 302 aa, Homo sapiens
  REGION 1..302: note = ENSP00000397181
MYNMMLLIQKRKGIGSQLLRAGEAEGDRGAGTAERSSDWLDGRSWAIKETPTGLAGRRSEDSDNIFTGEEAKYAQSRSHSSSCRISFLLANSKLLNKMCKGLAGLPASCLRSAKDMKHRLGFLLQKSDSCEHNSSHNKKDKVVICQRVSQEEVKKWAESLENLISHECGLAAFKAFLKSEYSEENIDFWISCEEYKKIKSPSKLSPKAKKIYNEFISVQATKEVNLDSCTREETSRNMLEPTITCFDEAQKKIFNLMEKDSYRRFLKSRFYLDLVNPSSCGAEKQKGAKSSADCASLVPQCA

SEQ ID NO: 34798 - protein, 205 aa, Homo sapiens
  REGION 1..205: note = ENSP00000356885
MCKGLAGLPASCLRSAKDMKHRLGFLLQKSDSCEHNSSHNKKDKVVICQRVSQEEVKKWAESLENLISHECGLAAFKAFLKSEYSEENIDFWISCEEYKKIKSPSKLSPKAKKIYNEFISVQATKEVNLDSCTREETSRNMLEPTITCFDEAQKKIFNLMEKDSYRRFLKSRFYLDLVNPSSCGAEKQKGAKSSADCASLVPQCA

SEQ ID NO: 34799 - protein, 113 aa, Homo sapiens
  REGION 1..113: note = ENSP00000436106
MCKGLAGLPASCLRSAKDMKHRLGFLLQKSDSCEHNSSHNKKDKVVICQRVSQEEVKKWAESLENLISHECGLAAFKAFLKSEYSEENIDFWISCEEYKKIKSPSKLSPKAKY

SEQ ID NO: 34800 - protein, 187 aa, Homo sapiens
  REGION 1..187: note = ENSP00000433261
MKHRLGFLLQKSDSCEHNSSHNKKDKVVICQRVSQEEVKKWAESLENLISHECGLAAFKAFLKSEYSEENIDFWISCEEYKKIKSPSKLSPKAKKIYNEFISVQATKEVNLDSCTREETSRNMLEPTITCFDEAQKKIFNLMEKDSYRRFLKSRFYLDLVNPSSCGAEKQKGAKSSADCASLVPQCA

SEQ ID NO: 34801 - protein, 93 aa, Homo sapiens
  REGION 1..93: note = ENSP00000356884
MCKGLAGLPASCLRSAKDMKHRLGFLLQKSDSCEHNSSHNKKDKVVICQRVSQEEVKKWAESLENLISHECEPGFLHQGRDKPEHARAYNNLL

SEQ ID NO: 34802 - protein, 187 aa, Homo sapiens; identical to SEQ ID NO: 34800
  REGION 1..187: note = ENSP00000356882

SEQ ID NO: 34803 - protein, 143 aa, Homo sapiens
  REGION 1..143: note = ENSP00000432194
MKHRLGFLLQKSDSCEHNSSHNKKDKVVICQRVSQEEVKKWAESLENLISHECGLAAFKAFLKSEYSEENIDFWISCEEYKKIKSPSKLSPKAKKIYNEFISVQATKEVNLDSCTREETSRNMLEPTITCFDEAQKKIFNLME

SEQ ID NO: 34804 - protein, 490 aa, Homo sapiens
  REGION 1..490: note = ENSP00000451030
MAQGSGDQRAVGVADPEESSPNMIVYCKIEDIITKMQDDKTGGVPIRTVKSFLSKIPSVVTGTDIVQWLMKNLSIEDPVEAIHLGSLIAAQGYIFPISDHVLTMKDDGTFYRFQAPYFWPSNCWEPENTDYAIYLCKRTMQNKARLELADYEAENLARLQRAFARKWEFIFMQAEAQVKIDRKKDKTERKILDSQERAFWDVHRPVPGCVNTTEMDIRKCRRLKNPQKVKKSVYGVTEESQAQSPVHVLSQPIRKTTKEDIRKQITFLNAQIDRHCLKMSKVAESLIAYTEQYVEYDPLITPAEPSNPWISDDVALWDIEMSKEPSQQRVKRWGFSFDEILKDQVGRDQFLRFLESEFSSENLRFWLAVQDLKKQPLQDVAKRVEEIWQEFLAPGAPSAINLDSHSYEITSQNVKDGGRYTFEDAQEHIYKLMKSDSYARFLRSNAYQDLLLAKKKPESEQGRRTSLEKFTRSVGKSLAGKRLTGLMQSS

SEQ ID NO: 34805 - protein, 472 aa, Homo sapiens
  REGION 1..472: note = ENSP00000450936
MAQGSGDQRAVGVADPEESSPNMIVYCKIEDIITKMQDDKTGGVPIRTVKSFLSKIPSVVTGTDIVQWLMKNLSIEDPVEAIHLGSLIAAQGYIFPISDHVLTMKDDGTFYRFQAPYFWPSNCWEPENTDYAIYLCKRTMQNKARLELADYEAENLARLQRAFARKWEFIFMQAEAQVKIDRKKDKTERKILDSQERAFWDVHRPVPGCVNTTEMDIRKCRRLKNPQKVKKSVYGVTEESQAQSPVHVLSQPIRKTTKEDIRKQITFLNAQIDRHCLKMSKVAESLIAYTEQYVEYDPLITPAEPSNPWISDDVALWDIEMSKEPSQQRVKRWGFSFDEILKDQVGRDQFLRFLESEFSSENLRFWLAVQDLKKQPLQDVAKRVEEIWQEFLAPGAPSAINLDSHSYEITSQNVKDGGRYTFEDAQEHIYKLMKSDSYARFLRSNAYQDLLLAKKKGKSLAGKRLTGLMQSS

SEQ ID NO: 34806 - protein, 472 aa, Homo sapiens; identical to SEQ ID NO: 34805
  REGION 1..472: note = ENSP00000452331

SEQ ID NO: 34807 - protein, 465 aa, Homo sapiens
  REGION 1..465: note = ENSP00000450858
MAQGSGDQRAVGVADPEESSPNMIVYCKIEDIITKMQDDKTGGVPIRTVKSFLSKIPSVVTGTDIVQWLMKNLSIEDPVEAIHLGSLIAAQGYIFPISDHVLTMKDDGTFYRFQAPYFWPSNCWEPENTDYAIYLCKRTMQNKARLELADYEAENLARLQRAFARKWEFIFMQAEAQVKIDRKKDKTERKILDSQERAFWDVHRPVPGCVNTTEMDIRKCRRLKNPQKVKKSVYGVTEESQAQSPVHVLSQPIRKTTKEDIRKQITFLNAQIDRHCLKMSKVAESLIAYTEQYVEYDPLITPAEPSNPWISDDVALWDIEMSKEPSQQRVKRWGFSFDEILKDQVGRDQFLRFLESEFSSENLRFWLAVQDLKKQPLQDVAKRVEEIWQEFLAPGAPSAINLDSHSYEITSQNVKDGGRYTFEDAQEHIYKLMKSDSYARFLRSNAYQDLLLAKKKKVSKVVELP

SEQ ID NO: 34808 - protein, 490 aa, Homo sapiens; identical to SEQ ID NO: 34804
  REGION 1..490: note = ENSP00000451855

SEQ ID NO: 34809 - protein, 460 aa, Homo sapiens
  REGION 1..460: note = ENSP00000347699
MAQGSGDQRAVGVADPEESSPNMIVYCKIEDIITKMQDDKTGGVPIRTVKSFLSKIPSVVTGTDIVQWLMKNLSIEDPVEAIHLGSLIAAQGYIFPISDHVLTMKDDGTFYRFQAPYFWPSNCWEPENTDYAIYLCKRTMQNKARLELADYEAENLARLQRAFARKWEFIFMQAEAQVKIDRKKDKTERKILDSQERAFWDVHRPVPGCVNTTEMDIRKCRRLKNPQKVKKSVYGVTEESQAQSPVHVLSQPIRKTTKEDIRKQITFLNAQIDRHCLKMSKVAESLIAYTEQYVEYDPLITPAEPSNPWISDDVALWDIEMSKEPSQQRVKRWGFSFDEILKDQVGRDQFLRFLESEFSSENLRFWLAVQDLKKQPLQDVAKRVEEIWQEFLAPGAPSAINLDSHSYEITSQNVKDGGRYTFEDAQEHIYKLMKSDSYARFLRSNAYQDLLLAKKKVWLL

SEQ ID NO: 34810 - protein, 480 aa, Homo sapiens
  REGION 1..480: note = ENSP00000385243
MAQGSGDQRAVGVADPEESSPNMIVYCKIEDIITKMQDDKTGGVPIRTVKSFLSKIPSVVTGTDIVQWLMKNLSIEDPVEAIHLGSLIAAQGYIFPISDHVLTMKDDGTFYRFQAPYFWPSNCWEPENTDYAIYLCKRTMQNKARLELADYEAENLARLQRAFARKWEFIFMQAEAQVKIDRKKDKTERKILDSQERAFWDVHRPVPGCVNTTEMDIRKCRRLKNPQKVKKSVYGVTEESQAQSPVHVLSQPIRKTTKEDIRKQITFLNAQIDRHCLKMSKVAESLIAYTEQYVEYDPLITPAEPSNPWISDDVALWDIEMSKEPSQQRVKRWGFSFDEILKDQVGRDQFLRFLESEFSSENLRFWLAVQDLKKQPLQDVAKRVEEIWQEFLAPGAPSAINLDSHSYEITSQNVKDGGRYTFEDAQEHIYKLMKSDSYARFLRSNAYQDLLLAKKKPESEQGRRTSLEKFTRSVCLQLLF

SEQ ID NO: 34811 - protein, 475 aa, Homo sapiens
  REGION 1..475: note = ENSP00000384218
MAQGSGDQRAVGVADPEESSPNMIVYCKIEDIITKMQDDKTGGVPIRTVKSFLSKIPSVVTGTDIVQWLMKNLSIEDPVEAIHLGSLIAAQGYIFPISDHVLTMKDDGTFYRFQAPYFWPSNCWEPENTDYAIYLCKRTMQNKARLELADYEAENLARLQRAFARKWEFIFMQAEAQVKIDRKKDKTERKILDSQERAFWDVHRPVPGCVNTTEMDIRKCRRLKNPQKVKKSVYGVTEESQAQSPVHVLSQPIRKTTKEDIRKQITFLNAQIDRHCLKMSKVAESLIAYTEQYVEYDPLITPAEPSNPWISDDVALWDIEMSKEPSQQRVKRWGFSFDEILKDQVGRDQFLRFLESEFSSENLRFWLAVQDLKKQPLQDVAKRVEEIWQEFLAPGAPSAINLDSHSYEITSQNVKDGGRYTFEDAQEHIYKLMKSDSYARFLRSNAYQDLLLAKKKPESEQGRRTSLEKFTRSVG

SEQ ID NO: 34812 - protein, 477 aa, Homo sapiens
  REGION 1..477: note = ENSP00000384612
MAQGSGDQRAVGVADPEESSPNMIVYCKIEDIITKMQDDKTGGVPIRTVKSFLSKIPSVVTGTDIVQWLMKNLSIEDPVEAIHLGSLIAAQGYIFPISDHVLTMKDDGTFYRFQAPYFWPSNCWEPENTDYAIYLCKRTMQNKARLELADYEAENLARLQRAFARKWEFIFMQAEAQVKIDRKKDKTERKILDSQERAFWDVHRPVPGCVNTTEMDIRKCRRLKNPQKVKKSVYGVTEESQAQSPVHVLSQPIRKTTKEDIRKQITFLNAQIDRHCLKMSKVAESLIAYTEQYVEYDPLITPAEPSNPWISDDVALWDIEMSKEPSQQRVKRWGFSFDEILKDQVGRDQFLRFLESEFSSENLRFWLAVQDLKKQPLQDVAKRVEEIWQEFLAPGAPSAINLDSHSYEITSQNVKDGGRYTFEDAQEHIYKLMKSDSYARFLRSNAYQDLLLAKKKPESEQGRRTSLEKFTRSVLLF

SEQ ID NO: 34813 - protein, 539 aa, Homo sapiens
  REGION 1..539: note = ENSP00000412144
MKNLSIEDPVEAIHLGSLIAAQGYIFPISDHVLTMKDDGTFYRFQAPYFWPSNCWEPENTDYAIYLCKRTMQNKARLELADYEAENLARLQRAFARKWEFIFMQAEAQVKIDRKKDKTERKILDSQERAFWDVHRPVPGCVNTTEMDIRKCRRLKNPQKVKKSVYGVTEESQAQSPVHVLSQPIRKTTKEDIRKQITFLNAQIDRHCLKMSKVAESLIAYTEQYVEYDPLITPAEPSNPWISDDVALWDIEMSKEPSQQRVKRWGFSFDEILKDQVGRDQFLRFLESEFSSENLRFWLAVQDLKKQPLQDVAKRVEEIWQEFLAPGAPSAINLDSHSYEITSQNVKDGGRYTFEDAQEHIYKLMKSDSYARFLRSNAYQDLLLAKKKPESEQGRRTSLEKFTRSVNVQNTRPAGAWSIFMAALPMAVWLRTPRSCHGLSESRLLGLPSLHDGLREGQSLPQSCPGSSSTAAEGARERASNGRSLARRQHCQCHGQGEETQLCLWSRLESSKRSQRASSLRTSKAKKKRQTVKQGPKAWP

SEQ ID NO: 34814 - protein, 346 aa, Homo sapiens
  REGION 1..346: note = ENSP00000451912
MQNKARLELADYEAENLARLQRAFARKWEFIFMQAEAQVKIDRKKDKTERKILDSQERAFWDVHRPVPGCVNTTEMDIRKCRRLKNPQKVKKSVYGVTEESQAQSPVHVLSQPIRKTTKEDIRKQITFLNAQIDRHCLKMSKVAESLIAYTEQYVEYDPLITPAEPSNPWISDDVALWDIEMSKEPSQQRVKRWGFSFDEILKDQVGRDQFLRFLESEFSSENLRFWLAVQDLKKQPLQDVAKRVEEIWQEFLAPGAPSAINLDSHSYEITSQNVKDGGRYTFEDAQEHIYKLMKSDSYARFLRSNAYQDLLLAKKKPESEQGRRTSLEKFTRSVLYSNTPLAKRP

SEQ ID NO: 34815 - protein, 437 aa, Homo sapiens
  REGION 1..437: note = ENSP00000383953
MQDDKTGGVPIRTVKSFLSKIPSVVTGTDIVQWLMKNLSIEDPVEAIHLGSLIAAQGYIFPISDHVLTMKDDGTFYRFQAPYFWPSNCWEPENTDYAIYLCKRTMQNKARLELADYEAENLARLQRAFARKWEFIFMQAEAQVKIDRKKDKTERKILDSQERAFWDVHRPVPGCVNTTEMDIRKCRRLKNPQKVKKSVYGVTEESQAQSPVHVLSQPIRKTTKEDIRKQITFLNAQIDRHCLKMSKVAESLIAYTEQYVEYDPLITPAEPSNPWISDDVALWDIEMSKEPSQQRVKRWGFSFDEILKDQVGRDQFLRFLESEFSSENLRFWLAVQDLKKQPLQDVAKRVEEIWQEFLAPGAPSAINLDSHSYEITSQNVKDGGRYTFEDAQEHIYKLMKSDSYARFLRSNAYQDLLLAKKKGKSLAGKRLTGLMQSS

SEQ ID NO: 34816 - protein, 455 aa, Homo sapiens
  REGION 1..455: note = ENSP00000478186
MQDDKTGGVPIRTVKSFLSKIPSVVTGTDIVQWLMKNLSIEDPVEAIHLGSLIAAQGYIFPISDHVLTMKDDGTFYRFQAPYFWPSNCWEPENTDYAIYLCKRTMQNKARLELADYEAENLARLQRAFARKWEFIFMQAEAQVKIDRKKDKTERKILDSQERAFWDVHRPVPGCVNTTEMDIRKCRRLKNPQKVKKSVYGVTEESQAQSPVHVLSQPIRKTTKEDIRKQITFLNAQIDRHCLKMSKVAESLIAYTEQYVEYDPLITPAEPSNPWISDDVALWDIEMSKEPSQQRVKRWGFSFDEILKDQVGRDQFLRFLESEFSSENLRFWLAVQDLKKQPLQDVAKRVEEIWQEFLAPGAPSAINLDSHSYEITSQNVKDGGRYTFEDAQEHIYKLMKSDSYARFLRSNAYQDLLLAKKKPESEQGRRTSLEKFTRSVGKSLAGKRLTGLMQSS

SEQ ID NO: 34817 - protein, 418 aa, Homo sapiens
  REGION 1..418: note = ENSP00000341199
MQDDKTGGVPIRTVKSFLSKIPSVVTGTDIVQWLMKNLSIEDPVEAIHLGSLIAAQGYIFPISDHVLTMKDDGTFYRFQAPYFWPSNCWEPENTDYAIYLCKRTMQNKARLELADYEAENLARLQRAFARKWEFIFMQAEAQVKIDRKKDKTERKILDSQERAFWDVHRPVPGCVNTTEMDIRKCRRLKNPQKVKKSVYGVTEESQAQSPVHVLSQPIRKTTKEDIRKQITFLNAQIDRHCLKMSKVAESKEPSQQRVKRWGFSFDEILKDQVGRDQFLRFLESEFSSENLRFWLAVQDLKKQPLQDVAKRVEEIWQEFLAPGAPSAINLDSHSYEITSQNVKDGGRYTFEDAQEHIYKLMKSDSYARFLRSNAYQDLLLAKKKPESEQGRRTSLEKFTRSVGKSLAGKRLTGLMQSS

SEQ ID NO: 34818 - protein, 257 aa, Homo sapiens
  REGION 1..257: note = ENSP00000334851
MSSAPNGRKKRPSRSTRSSIFQISKPPLQSGDWERRGSGSESAHKTQRALDDCKMLVQEFNTQVALYRELVISIGDVSVSCPSLRAEMHKTRTKGCEMARQAHQKLAAISGPEDGEIHPEICRLYIQLQCCLEMYTTEMLKSICLLGSLQFHRKGKEPGGGTKSLDCKIEESAETPALEDSSSSPVDSQQHSWQVSTDIENTERDMREMKNLLSKLRETMPLPLKNQDDSSLLNLTPYPLVRRRKRRFFGLCCLISS

SEQ ID NO: 34819 - protein, 198 aa, Homo sapiens
  REGION 1..198: note = ENSP00000258302
MWNTLTRSLSDHPVGKDPQAMRTGQRQNKGMRTRLGCLSHKSDSCSDFTAILPDKPNRALKRLSTEEATRWADSFDVLLSHKYGVAAFRAFLKTEFSEENLEFWLACEEFKKTRSTAKLVSKAHRIFEEFVDVQAPREVNIDFQTREATRKNLQEPSLTCFDQAQGKVHSLMEKDSYPRFLRSKMYLDLLSQSQRRLS

SEQ ID NO: 34820 - protein, 180 aa, Homo sapiens
  REGION 1..180: note = ENSP00000426289
MAALLMPRRNKGMRTRLGCLSHKSDSCSDFTAILPDKPNRALKRLSTEEATRWADSFDVLLSHKYGVAAFRAFLKTEFSEENLEFWLACEEFKKTRSTAKLVSKAHRIFEEFVDVQAPREVNIDFQTREATRKNLQEPSLTCFDQAQGKVHSLMEKDSYPRFLRSKMYLDLLSQSQRRLS

SEQ ID NO: 34821 - protein, 180 aa, Homo sapiens; identical to SEQ ID NO: 34820
  REGION 1..180: note = ENSP00000356528

SEQ ID NO: 34822 - protein, 180 aa, Homo sapiens; identical to SEQ ID NO: 34820
  REGION 1..180: note = ENSP00000356527

SEQ ID NO: 34823 - protein, 57 aa, Homo sapiens
  REGION 1..57: note = ENSP00000427076
MAALLMPRRNKGMRTRLGCLSHKSDSCSDFTAILPDKPNRALKRLSTEEATRWADSF

SEQ ID NO: 34824 - protein, 674 aa, Homo sapiens
  REGION 1..674: note = ENSP00000490658
MTIRYQGRQYRLRMAFLQKIEALVKDMQNPETGVRMQNQRVLVTSVPHAMTGSDVLQWIVQRLWISSLEAQNLGNFIVRYGYIYPLQDPKNLILKPDGSLYRFQTPYFWPTQQWPAEDTDYAIYLAKRNIKKKGILEEYEKENYNFLNQKMNYKWDFVIMQAKEQYRAGKERNKADRYALDCQEKAYWLVHRCPPGMDNVLDYGLDRVTNPNEVKVNQKQTVVAVKKEIMYYQQALMRSTVKSSVSLGGIVKYSEQFSSNDAIMSGCLPSNPWITDDTQFWDLNAKLVEIPTKMRVERWAFNFSELIRDPKGRQSFQYFLKKEFSGENLGFWEACEDLKYGDQSKVKEKAEEIYKLFLAPGARRWINIDGKTMDITVKGLKHPHRYVLDAAQTHIYMLMKKDSYARYLKSPIYKDMLAKAIEPQETTKKSSTLPFMRRHLRSSPSPVILRQLEEEAKAREAANTVDITQPGQHMAPSPHLTVYTGTCMPPSPSSPFSSSCRSPRKPFASPSRFIRRPSTTICPSPIRVALESSSGLEQKGECSGSMAPRGPSVTESSEASLDTSWPRSRPRAPPKARMALSFSRFLRRGCLASPVFARLSPKCPAVSHGRVQPLGDVGQQLPRLKSKRVANFFQIKMDVPTGSGTCLMDSEDAGTGESGDRATEKEVICPWESL

SEQ ID NO: 34825 - protein, 628 aa, Homo sapiens
  REGION 1..628: note = ENSP00000405814
MTIRHQGQQYRPRMAFLQKIEALVKDMQNPETGVRMQNQRVLVTSVPHAMTGSDVLQWIVQRLWISSLEAQNLGNFIVRYGYIYPLQDPKNLILKPDGSLYRFQTPYFWPTQQWPAEDTDYAIYLAKRNIKKKGILEEYEKENYNFLNQKMNYKWDFVIMQAKEQYRAGKERNKADRYALDCQEKAYWLVHRCPPGMDNVLDYGLDRVTNPNEVKKQTVVAVKKEIMYYQQALMRSTVKSSVSLGGIVKYSEQFSSNDAIMSGCLPSNPWITDDTQFWDLNAKLVEIPTKMRVERWAFNFSELIRDPKGRQSFQYFLKKEFSGENLGFWEACEDLKYGDQSKVKEKAEEIYKLFLAPGARRWINIDGKTMDITVKGLKHPHRYVLDAAQTHIYMLMKKDSYARYLKSPIYKDMLAKAIEPQETTKKSSTLPFMRRHLRSSPSPVILRQLEEEAKAREAANTVDITQPGQHMAPSPHLTVYTGTCMPPSPSSPFSSSCRSPRKPFASPSRFIRRPSTTICPSPIRVALESSSGLEQKGECSGSMAPRGPSVTESSEASLDTSWPRSRPRAPPKARMALSFSRFLRRGCLASPVFARLSPKCPAVSHGRVQPLGDVGQQLPRLKSKRVAK

SEQ ID NO: 34826 - protein, 494 aa, Homo sapiens
  REGION 1..494: note = ENSP00000463410
MTIRHQGQQYRPRMAFLQKIEALVKDMQNPETGVRMQNQRVLVTSVPHAMTGSDVLQWIVQRLWISSLEAQNLGNFIVRYGYIYPLQDPKNLILKPDGSLYRFQTPYFWPTQQWPAEDTDYAIYLAKRNIKKKGILEEYEKENYNFLNQKMNYKWDFVIMQAKEQYRAGKERNKADRYALDCQEKAYWLVHRCPPGMDNVLDYGLDRVTNPNEVKVNQKQTVVAVKKEIMYYQQALMRSTVKSSVSLGGIVKYSEQFSSNDAIMSGCLPSNPWITDDTQFWDLNAKLVEIPTKMRVERWAFNFSELIRDPKGRQSFQYFLKKEFSGENLGFWEACEDLKYGDQSKVKEKAEEIYKLFLAPGARRWINIDGKTMDITVKGLKHPHRYVLDAAQTHIYMLMKKDSYARYLKSPIYKDMLAKAIEPQETTKKRQLHPPFYAASPALQPKPCHPETAGRGSQGPRSSQHCGHHPAGPAHGSQPPSDRVHRDLHAPVSF

SEQ ID NO: 34827 - protein, 671 aa, Homo sapiens
  REGION 1..671: note = ENSP00000396329
MTIRHQGQQYRPRMAFLQKIEALVKDMQNPETGVRMQNQRVLVTSVPHAMTGSDVLQWIVQRLWISSLEAQNLGNFIVRYGYIYPLQDPKNLILKPDGSLYRFQTPYFWPTQQWPAEDTDYAIYLAKRNIKKKGILEEYEKENYNFLNQKMNYKWDFVIMQAKEQYRAGKERNKADRYALDCQEKAYWLVHRCPPGMDNVLDYGLDRVTNPNEVKKQTVVAVKKEIMYYQQALMRSTVKSSVSLGGIVKYSEQFSSNDAIMSGCLPSNPWITDDTQFWDLNAKLVEIPTKMRVERWAFNFSELIRDPKGRQSFQYFLKKEFSGENLGFWEACEDLKYGDQSKVKEKAEEIYKLFLAPGARRWINIDGKTMDITVKGLKHPHRYVLDAAQTHIYMLMKKDSYARYLKSPIYKDMLAKAIEPQETTKKSSTLPFMRRHLRSSPSPVILRQLEEEAKAREAANTVDITQPGQHMAPSPHLTVYTGTCMPPSPSSPFSSSCRSPRKPFASPSRFIRRPSTTICPSPIRVALESSSGLEQKGECSGSMAPRGPSVTESSEASLDTSWPRSRPRAPPKARMALSFSRFLRRGCLASPVFARLSPKCPAVSHGRVQPLGDVGQQLPRLKSKRVANFFQIKMDVPTGSGTCLMDSEDAGTGESGDRATEKEVICPWESL

SEQ ID NO: 34828 - protein, 674 aa, Homo sapiens
  REGION 1..674: note = ENSP00000262406
MTIRHQGQQYRPRMAFLQKIEALVKDMQNPETGVRMQNQRVLVTSVPHAMTGSDVLQWIVQRLWISSLEAQNLGNFIVRYGYIYPLQDPKNLILKPDGSLYRFQTPYFWPTQQWPAEDTDYAIYLAKRNIKKKGILEEYEKENYNFLNQKMNYKWDFVIMQAKEQYRAGKERNKADRYALDCQEKAYWLVHRCPPGMDNVLDYGLDRVTNPNEVKVNQKQTVVAVKKEIMYYQQALMRSTVKSSVSLGGIVKYSEQFSSNDAIMSGCLPSNPWITDDTQFWDLNAKLVEIPTKMRVERWAFNFSELIRDPKGRQSFQYFLKKEFSGENLGFWEACEDLKYGDQSKVKEKAEEIYKLFLAPGARRWINIDGKTMDITVKGLKHPHRYVLDAAQTHIYMLMKKDSYARYLKSPIYKDMLAKAIEPQETTKKSSTLPFMRRHLRSSPSPVILRQLEEEAKAREAANTVDITQPGQHMAPSPHLTVYTGTCMPPSPSSPFSSSCRSPRKPFASPSRFIRRPSTTICPSPIRVALESSSGLEQKGECSGSMAPRGPSVTESSEASLDTSWPRSRPRAPPKARMALSFSRFLRRGCLASPVFARLSPKCPAVSHGRVQPLGDVGQQLPRLKSKRVANFFQIKMDVPTGSGTCLMDSEDAGTGESGDRATEKEVICPWESL

SEQ ID NO: 34829 - protein, 97 aa, Homo sapiens
  REGION 1..97: note = ENSP00000389836
MAGSPSRAAGRRLQLPLLCLFLQGATAVLFAVFVRYNHKTDAALWHRSNHSNADNEFYFRYPNGVSLLLPRLECNGTISAHHNLCLPGSSDSPASVS

SEQ ID NO: 34830 - protein, 458 aa, Homo sapiens
  REGION 1..458: note = ENSP00000441197
MAGSPSRAAGRRLQLPLLCLFLQGATAVLFAVFVRYNHKTDAALWHRSNHSNADNEFYFRYPSFQDVHAMVFVGFGFLMVFLQRYGFSSVGFTFLLAAFALQWSTLVQGFLHSFHGGHIHVGVESMINADFCAGAVLISFGAVLGKTGPTQLLLMALLEVVLFGINEFVLLHLLGVRDAGGSMTIHTFGAYFGLVLSRVLYRPQLEKSKHRQGSVYHSDLFAMIGTIFLWIFWPSFNAALTALGAGQHRTALNTYYSLAASTLGTFALSALVGEDGRLDMVHIQNAALAGGVVVGTSSEMMLTPFGALAAGFLAGTVSTLGYKFFTPILESKFKVQDTCGVHNLHGMPGVLGALLGVLVAGLATHEAYGDGLESVFPLIAEGQRSATSQAMHQLFGLFVTLMFASVGGGLGGLLLKLPFLDSPPDSQHYEDQVHWQVPGEHEDKAQRPLRVEEADTQA

SEQ ID NO: 34831 - protein, 97 aa, Homo sapiens; identical to SEQ ID NO: 34829
  REGION 1..97: note = ENSP00000483178

SEQ ID NO: 34832 - protein, 153 aa, Homo sapiens
  REGION 1..153: note = ENSP00000477836
MAGSPSRAAGRRLQLPLLCLFLQGATAVLFAVFVRYNHKTDAALWHRSNHSNADNEFYFRYPKESHSVAQAGVQRRNLGSLQPSPPRLPGRACHGLRGLWLPHGLPAALRLQQRGLHLPPGRLCPAVVHTGPGLSPLLPRWPHPCWRGEHDQC

SEQ ID NO: 34833 - protein, 97 aa, Homo sapiens
  REGION 1..97: note = ENSP00000478851
  VARIANT 1: note = Any amino acid
XAGSPSRAAGRRLQLPLLCLFLQGATAVLFAVFVRYNHKTDAALWHRSNHSNADNEFYFRYPNGVSLLLPRLECNGTISAHHNLCLPGSSDSPASVS

SEQ ID NO: 34834 - protein, 331 aa, Homo sapiens
  REGION 1..331: note = ENSP00000453588
MAWNTNLRWRLPLTCLLLQVIMVILFGVFVRYDFEADAHWWSERTHKNLSDMENEFYYRYPSFQDVHVMVFVGFGFLMTFLQRYGFSAVGFNFLLAAFGIQWALLMQGWFHFLQDRYIVVGVENLINADFCVASVCVAFGAVLGKVSPIQLLIMTFFQVTLFAVNEFILLNLLKVKDAGGSMTIHTFGAYFGLTVTRILYRRNLEQSKERQNSVYQSDLFAMIGTLFLWMYWPSFNSAISYHGDSQHRAAINTYCSLAACVLTSVAISSALHKKGKLDMVHIQNATLAGGVAVGTAAEMMLMPYGALIIGFVCGIISTLGFVYLTAASWVL

SEQ ID NO: 34835 - protein, 479 aa, Homo sapiens
  REGION 1..479: note = ENSP00000268122
MAWNTNLRWRLPLTCLLLQVIMVILFGVFVRYDFEADAHWWSERTHKNLSDMENEFYYRYPSFQDVHVMVFVGFGFLMTFLQRYGFSAVGFNFLLAAFGIQWALLMQGWFHFLQDRYIVVGVENLINADFCVASVCVAFGAVLGKVSPIQLLIMTFFQVTLFAVNEFILLNLLKVKDAGGSMTIHTFGAYFGLTVTRILYRRNLEQSKERQNSVYQSDLFAMIGTLFLWMYWPSFNSAISYHGDSQHRAAINTYCSLAACVLTSVAISSALHKKGKLDMVHIQNATLAGGVAVGTAAEMMLMPYGALIIGFVCGIISTLGFVYLTPFLESRLHIQDTCGINNLHGIPGIIGGIVGAVTAASASLEVYGKEGLVHSFDFQGFNGDWTARTQGKFQIYGLLVTLAMALMGGIIVGLILRLPFWGQPSDENCFEDAVYWEMPEGNSTVYIPEDPTFKPSGPSVPSVPMVSPLPMASSVPLVP

SEQ ID NO: 34836 - protein, 237 aa, Homo sapiens
  REGION 1..237: note = ENSP00000453496
  VARIANT 1: note = Any amino acid
XDSQHRAAINTYCSLAACVLTSVAISSALHKKGKLDMVHIQNATLAGGVAVGTAAEMMLMPYGALIIGFVCGIISTLGFVYLTPFLESRLHIQDTCGINNLHGIPGIIGGIVGAVTAASASLEVYGKEGLVHSFDFQGFNGDWTARTQGKFQIYGLLVTLAMALMGGIIVGLILRLPFWGQPSDENCFEDAVYWEMPEGNSTVYIPEDPTFKPSGPSVPSVPMVSPLPMASSVPLVP

SEQ ID NO: 34837 - protein, 233 aa, Homo sapiens
  REGION 1..233: note = ENSP00000452899
MAWNTNLRWRLPLTCLLLQVIMVILFGVFVRYDFEADAHWWSERTHKNLSDMENEFYYRYPSFQDVHVMVFVGFGFLMTFLQRYGFSAVGFNFLLAAFGIQWALLMQGWFHFLQDRYIVVGVENLINADFCVASVCVAFGAVLGKVSPIQLLIMTFFQAPSSCGCTGPASTQPYPTMGTASTEPPSTPTAPWQPACLPRWQYPVPCTRRASWTWCTSRMPRSQEGWPWVPLLR

SEQ ID NO: 34838 - protein, 136 aa, Homo sapiens
  REGION 1..136: note = ENSP00000453716
MAWNTNLRWRLPLTCLLLQVIMVILFGVFVRYDFEADAHWWSERTHKNLSDMENEFYYRYPSFQDVHVMVFVGFGFLMTFLQRYGFSAVGFNFLLAAFGIQWALLMQGWFHFLQDRYIVVGVENDSPGWESSKCHT

SEQ ID NO: 34839 - protein, 184 aa, Homo sapiens
  REGION 1..184: note = ENSP00000262187
MPQSKSRKIAILGYRSVGKSSLTIQFVEGQFVDSYDPTIENTFTKLITVNGQEYHLQLVDTAGQDEYSIFPQTYSIDINGYILVYSVTSIKSFEVIKVIHGKLLDMVGKVQIPIMLVGNKKDLHMERVISYEEGKALAESWNAAFLESSAKENQTAVDVFRRIILEAEKMDGAASQGKSSCSVM

SEQ ID NO: 34840 - protein, 79 aa, Homo sapiens
  REGION 1..79: note = ENSP00000420726
MVGKVQIPIMLVGNKKDLHMERVISYEEGKALAESWNAAFLESSAKENQTAVDVFRRIILEAEKMDGAASQGKSSCSVM

SEQ ID NO: 34841 - protein, 47 aa, Homo sapiens
  REGION 1..47: note = ENSP00000417802
MPQSKSRKIAILGYRSVGSSSQDLRTCCEWCYSSAGRTGASPWAHLI

SEQ ID NO: 34842 - protein, 79 aa, Homo sapiens; identical to SEQ ID NO: 34840
  REGION 1..79: note = ENSP00000418161

SEQ ID NO: 34843 - protein, 19 aa, Homo sapiens
  REGION 1..19: note = ENSP00000417212
MVGKVQIPIMLVGNKKDLH

SEQ ID NO: 34844 - protein, 196 aa, Homo sapiens
  REGION 1..196: note = ENSP00000272233
MAAIRKKLVVVGDGACGKTCLLIVFSKDEFPEVYVPTVFENYVADIEVDGKQVELALWDTAGQEDYDRLRPLSYPDTDVILMCFSVDSPDSLENIPEKWVPEVKHFCPNVPIILVANKKDLRSDEHVRTELARMKQEPVRTDDGRAMAVRIQAYDYLECSAKTKEGVREVFETATRAALQKRYGSQNGCINCCKVL

SEQ ID NO: 34845 - protein, 696 aa, Homo sapiens
  REGION 1..696: note = ENSP00000338671
MDADMDYERPNVETIKCVVVGDNAVGKTRLICARACNTTLTQYQLLATHVPTVWAIDQYRVCQEVLERSRDVVDEVSVSLRLWDTFGDHHKDRRFAYGRSDVVVLCFSIANPNSLNHVKSMWYPEIKHFCPRTPVILVGCQLDLRYADLEAVNRARRPLARPIKRGDILPPEKGREVAKELGLPYYETSVFDQFGIKDVFDNAIRAALISRRHLQFWKSHLKKVQKPLLQAPFLPPKAPPPVIKIPECPSMGTNEAACLLDNPLCADVLFILQDQEHIFAHRIYLATSSSKFYDLFLMECEESPNGSEGACEKEKQSRDFQGRILSVDPEEEREEGPPRIPQADQWKSSNKSLVEALGLEAEGAVPETQTLTGWSKGFIGMHREMQVNPISKRMGPMTVVRMDASVQPGPFRTLLQFLYTGQLDEKEKDLVGLAQIAEVLEMFDLRMMVENIMNKEAFMNQEITKAFHVRKANRIKECLSKGTFSDVTFKLDDGAISAHKPLLICSCEWMAAMFGGSFVESANSEVYLPNINKISMQAVLDYLYTKQLSPNLDLDPLELIALANRFCLPHLVALAEQHAVQELTKAATSGVGIDGEVLSYLELAQFHNAHQLAAWCLHHICTNYNSVCSKFRKEIKSKSADNQEYFERHRWPPVWYLKEEDHYQRVKREREKEDIALNKHRSRRKWCFWNSSPAVA

SEQ ID NO: 34846 - protein, 696 aa, Homo sapiens; identical to SEQ ID NO: 34845
  REGION 1..696: note = ENSP00000350595

SEQ ID NO: 34847 - protein, 180 aa, Homo sapiens
  REGION 1..180: note = ENSP00000423688
MRKRQTWSIHIVALGNEGDTFHQDNRPSGLIRTYLGRSPLVSGDESSLLLNAASTVARPVFTEYQASAFGNVKLVVHDCPVWDIFDSDWYTSRNLIGGADIIVIKYNVNDKFSFHEVKDNYIPVIKRALNSVPVIIAAVGTRQNEELPCTCPLCTSDRGSCVSTTEGIQLAKELGATYLE

SEQ ID NO: 34848 - protein, 104 aa, Homo sapiens
  REGION 1..104: note = ENSP00000426479
MSIHIVALGNEGDTFHQDNRPSGLIRTYLGRSPLVSGDESSLLLNAASTVARPVFTEYQASAFGNVKLVVHDCPVWVRKSSCSALRLKKLFFPFFSPSPFCPLP

SEQ ID NO: 34849 - protein, 611 aa, Homo sapiens
  REGION 1..611: note = ENSP00000369318
MSIHIVALGNEGDTFHQDNRPSGLIRTYLGRSPLVSGDESSLLLNAASTVARPVFTEYQASAFGNVKLVVHDCPVWDIFDSDWYTSRNLIGGADIIVIKYNVNDKFSFHEVKDNYIPVIKRALNSVPVIIAAVGTRQNEELPCTCPLCTSDRGSCVSTTEGIQLAKELGATYLELHSLDDFYIGKYFGGVLEYFMIQALNQKTSEKMKKRKMSNSFHGIRPPQLEQPEKMPVLKAEASHYNSDLNNLLFCCQCVDVVFYNPNLKKVVEAHKIVLCAVSHVFMLLFNVKSPTDIQDSSIIRTTQDLFAINRDTAFPGASHESSGNPPLRVIVKDALFCSCLSDILRFIYSGAFQWEELEEDIRKKLKDSGDVSNVIEKVKCILKTPGKINCLRNCKTYQARKPLWFYNTSLKFFLNKPMLADVVFEIQGTTVPAHRAILVARCEVMAAMFNGNYMEAKSVLIPVYGVSKETFLSFLEYLYTDSCCPAGIFQAMCLLICAEMYQVSRLQHICELFIITQLQSMPSRELASMNLDIVDLLKKAKFHHSDCLSTWLLHFIATNYLIFSQKPEFQDLSVEERSFVEKHRWPSNMYLKQLAEYRKYIHSRKCRCLVM

SEQ ID NO: 34850 - protein, 72 aa, Homo sapiens
  REGION 1..72: note = ENSP00000423652
LVSGDESSLLLNAASTVARPVFTEYQASAFGNVKLVVHDCPVWKSYLVHAHYVPQTEGAVLVQLKGSNLQKN

SEQ ID NO: 34851 - protein, 103 aa, Homo sapiens
  REGION 1..103: note = ENSP00000421875
  VARIANT 1: note = Any amino acid
XDIIVIKYNVNDKFSFHEVKDNYIPVIKRALNSVPVIIAAVGTRQNEELPCTCPLCTSDRGSCVSTTEGIQLAKELGATYLELHSLDDFYIGKYFGGVKKCLS

SEQ ID NO: 34852 - protein, 242 aa, Homo sapiens
  REGION 1..242: note = ENSP00000422360
MPKRAVLFTDRQPIQFLKINCLRNCKTYQARKPLWFYNTSLKFFLNKPMLADVVFEIQGTTVPAHRAILVARCEVMAAMFNGNYMEAKSVLIPVYGVSKETFLSFLEYLYTDSCCPAGIFQAMCLLICAEMYQVSRLQHICELFIITQLQSMPSRELASMNLDIVDLLKKAKFHHSDCLSTWLLHFIATNYLIFSQKPEFQDLSVEERSFVEKHRWPSNMYLKQLAEYRKYIHSRKCRCLVM

SEQ ID NO: 34853 - protein, 172 aa, Homo sapiens
  REGION 1..172: note = ENSP00000424844
  VARIANT 1: note = Any amino acid
XADVVFEIQGTTVPAHRAILVARCEVMAAMFNGNYMEAKSVLIPVYGVSKETFLSFLEYLYTDSCCPAGIFQAMCLLICAEMYQVSRLQHICELFIITQLQSMPSRELASMNLDIVDLLKKAKFHHSDCLSTWLLHFIATNYLIFSQKPEFQDLSGRLLISVLKRKLYVLCS

SEQ ID NO: 34854 - protein, 117 aa, Homo sapiens
  REGION 1..117: note = ENSP00000426390
  VARIANT 1: note = Any amino acid
XEMYQVSRLQHICELFIITQLQSMPSRELASMNLDIVDLLKKAKFHHSDCLSTWLLHFIATNYLIFSQKPEFQDLSVEERSFVEKHRWPSNMYLKQLAEYRKYIHSRKCRCLVIKRH

SEQ ID NO: 34855 - protein, 76 aa, Homo sapiens
  REGION 1..76: note = ENSP00000425342
  VARIANT 1: note = Any amino acid
XYLIFSQKPEFQDLSGSFMVKPEYLQRGGAKARAGHHDCHVRGIPSILRSREGKKIHSQKQLFTVTLIVTRIKMAK

SEQ ID NO: 34856 - protein, 37 aa, Homo sapiens
  REGION 1..37: note = ENSP00000424700
  VARIANT 1: note = Any amino acid
XIFSQKPEFQDLSVFFLKLQWKNAVLLKSTDGRRICT

SEQ ID NO: 34857 - protein, 210 aa, Homo sapiens
  REGION 1..210: note = ENSP00000308576
MTAAQAAGEEAPPGVRSVKVVLVGDGGCGKTSLLMVFADGAFPESYTPTVFERYMVNLQVKGKPVHLHIWDTAGQDDYDRLRPLFYPDASVLLLCFDVTSPNSFDNIFNRWYPEVNHFCKKVPIIVVGCKTDLRKDKSLVNKLRRNGLEPVTYHRGQEMARSVGAVAYLECSARLHDNVHAVFQEAAEVALSSRGRNFWRRITQGFCVVT

SEQ ID NO: 34858 - protein, 144 aa, Homo sapiens
  REGION 1..144: note = ENSP00000432003
MTAAQAAGEEAPPGVRSVKVVLVGDGGCGKTSLLMVFADGAFPEWYPEVNHFCKKVPIIVVGCKTDLRKDKSLVNKLRRNGLEPVTYHRGQEMARSVGAVAYLECSARLHDNVHAVFQEAAEVALSSRGRNFWRRITQGFCVVT

SEQ ID NO: 34859 - protein, 153 aa, Homo sapiens
  REGION 1..153: note = ENSP00000451796
MNCKEGTDSSCGCRGNDEKKMLKCVVVGDGAVGKTCLLMSYANDAFPEEYVPTVFDHYAVTVTVGGKQHLLGLYDTAGQEDYNQLRPLSYPNTDVFLICFSVVWDLPPPHPGMRMAANLCGQAPAKKEGTTRKELPLHGGLPHHPLSPPNTAH

SEQ ID NO: 34860 - protein, 214 aa, Homo sapiens
  REGION 1..214: note = ENSP00000316729
MNCKEGTDSSCGCRGNDEKKMLKCVVVGDGAVGKTCLLMSYANDAFPEEYVPTVFDHYAVTVTVGGKQHLLGLYDTAGQEDYNQLRPLSYPNTDVFLICFSVVNPASYHNVQEEWVPELKDCMPHVPYVLIGTQIDLRDDPKTLARLLYMKEKPLTYEHGVKLAKAIGAQCYLECSALTQKGLKAVFDEAILTIFHPKKKKKRCSEGHSCCSII

SEQ ID NO: 34861 - protein, 178 aa, Homo sapiens
  REGION 1..178: note = ENSP00000451643
MNCKEGTDSSCGCRGNDEKKMLKCVVVGDGAVGKTCLLMSYANDAFPEEYVPTVFDHYAVTVTVGGKQHLLGLYDTAGQEDYNQLRPLSYPNTDVFLICFSVVNPASYHNVQEEWVPELKDCMPHVPYVLIGTQIDLRDDPKTLARLLYMKEKPLTYEHGVKLAKAVQSDLNFILNVC

SEQ ID NO: 34862 - protein, 258 aa, Homo sapiens
  REGION 1..258: note = ENSP00000355652
MPPQQGDPAFPDRCEAPPVPPRRERGGRGGRGPGEPGGRGRAGGAEGRGVKCVLVGDGAVGKTSLVVSYTTNGYPTEYIPTAFDNFSAVVSVDGRPVRLQLCDTAGQDEFDKLRPLCYTNTDIFLLCFSVVSPSSFQNVSEKWVPEIRCHCPKAPIILVGTQSDLREDVKVLIELDKCKEKPVPEEAAKLCAEEIKAASYIECSALTQKNLKEVFDAAIVAGIQYSDTQQQPKKSKSRTPDKMKNLSKSWWKKYCCFV

SEQ ID NO: 34863 - protein, 686 aa, Homo sapiens
  REGION 1..686: note = ENSP00000254260
MTDALLPAAPQPLEKENDGYFRKGCNPLAQTGRSKLQNQRAALNQQILKAVRMRTGAENLLKVATNSKVREQVRLELSFVNSDLQMLKEELEGLNISVGVYQNTEEAFTIPLIPLGLKETKDVDFAVVLKDFILEHYSEDGYLYEDEIADLMDLRQACRTPSRDEAGVELLMTYFIQLGFVESRFFPPTRQMGLLFTWYDSLTGVPVSQQNLLLEKASVLFNTGALYTQIGTRCDRQTQAGLESAIDAFQRAAGVLNYLKDTFTHTPSYDMSPAMLSVLVKMMLAQAQESVFEKISLPGIRNEFFMLVKVAQEAAKVGEVYQQLHAAMSQAPVKENIPYSWASLACVKAHHYAALAHYFTAILLIDHQVKPGTDLDHQEKCLSQLYDHMPEGLTPLATLKNDQQRRQLGKSHLRRAMAHHEESVREASLCKKLRSIEVLQKVLCAAQERSRLTYAQHQEEDDLLNLIDAPSVVAKTEQEVDIILPQFSKLTVTDFFQKLGPLSVFSANKRWTPPRSIRFTAEEGDLGFTLRGNAPVQVHFLDPYCSASVAGAREGDYIVSIQLVDCKWLTLSEVMKLLKSFGEDEIEMKVVSLLDSTSSMHNKSATYSVGMQKTYSMICLAIDDDDKTDKTKKISKKLSFLSWGTNKNRQKSASTLCLPSVGAARPQVKKKLPSPFSLLNSDSSWY

SEQ ID NO: 34864 - protein, 128 aa, Homo sapiens
  REGION 1..128: note = ENSP00000465898
MTDALLPAAPQPLEKENDGYFRKGCNPLAQTGRSKLQNQRAALNQQILKAVRMRTGAENLLKVATNSKVREQVRLELSFVNSDLQMLKEELEGLNISVGVYQNTEILSWNITVKMAIYMKMKLQILWI

SEQ ID NO: 34865 - protein, 1052 aa, Homo sapiens
  REGION 1..1052: note = ENSP00000261655
MREAAERRQQLQLEHDQALAVLSAKQQEIDLLQKSKVRELEEKCRTQSEQFNLLSRDLEKFRQHAGKIDLLGGSAVAPLDISTAPSKPFPQFMNGLATSLGKGQESAIGGSSAIGEYIRPLPQPGDRPEPLSAKPTFLSRSGSARCRSESDMENERNSNTSKQRYSGKVHLCVARYSYNPFDGPNENPEAELPLTAGKYLYVYGDMDEDGFYEGELLDGQRGLVPSNFVDFVQDNESRLASTLGNEQDQNFINHSGIGLEGEHILDLHSPTHIDAGITDNSAGTLDVNIDDIGEDIVPYPRKITLIKQLAKSVIVGWEPPAVPPGWGTVSSYNVLVDKETRMNLTLGSRTKALIEKLNMAACTYRISVQCVTSRGSSDELQCTLLVGKDVVVAPSHLRVDNITQISAQLSWLPTNSNYSHVIFLNEEEFDIVKAARYKYQFFNLRPNMAYKVKVLAKPHQMPWQLPLEQREKKEAFVEFSTLPAGPPAPPQDVTVQAGVTPATIRVSWRPPVLTPTGLSNGANVTGYGVYAKGQRVAEVIFPTADSTAVELVRLRSLEAKGVTVRTLSAQGESVDSAVAAVPPELLVPPTPHPRPAPQSKPLASSGVPETKDEHLGPHARMDEAWEQSRAPGPVHGHMLEPPVGPGRRSPSPSRILPQPQGTPVSTTVAKAMAREAAQRVAESSRLEKRSVFLERSSAGQYAASDEEDAYDSPDFKRRGASVDDFLKGSELGKQPHCCHGDEYHTESSRGSDLSDIMEEDEEELYSEMQLEDGGRRRPSGTSHNALKILGNPASAGRVDHMGRRFPRGSAGPQRSRPVTVPSIDDYGRDRLSPDFYEESETDPGAEELPARIFVALFDYDPLTMSPNPDAAEEELPFKEGQIIKVYGDKDADGFYRGETCARLGLIPCNMVSEIQADDEEMMDQLLRQGFLPLNTPVEKIERSRRSGRRHSVSTRRMVALYDYDPRESSPNVDVEAELTFCTGDIITVFGEIDEDGFYYGELNGQKGLVPSNFLEEVPDDVEVYLSDAPSHYSQDTPMRSKAKRKKSVHFTP

SEQ ID NO: 34866 - protein, 62 aa, Homo sapiens
  REGION 1..62: note = ENSP00000439437
  VARIANT 1: note = Any amino acid
XREAGEVAGVIRYRRGEWWPCMTTTPEKARPTSMSRPNLHFAQEILLQFLVKLMKMDFIMGS

SEQ ID NO: 34867 - protein, 157 aa, Homo sapiens
  REGION 1..157: note = ENSP00000439030
MSPNPDAAEEELPFKEGQIIKVYGDKDADGFYRGETCARLGLIPCNMVSEIQADDEEMMDQLLRQGFLPLNTPVEKIERSRRSGRRHSVSTRRMVALYDYDPRESSPNVDVEAELTFCTGDIITVFGEIDEDGFYYGELNGQKGLVPSNFLEEVPDD

SEQ ID NO: 34868 - protein, 645 aa, Homo sapiens
  REGION 1..645: note = ENSP00000440347
MNGLATSLGKGQESAIGGSSAIGEYIRPLPQPGDRPEPLSAKPTFLSRSGSARCRSESDMENERNSNTSKQRYSGKVHLCVARYSYNPFDGPNENPEAELPLTAGKYLYVYGDMDEDGFYEGELLDGQRGLVPSNFVDFVQDNESRLASTLGNEQDQNFINHSGIGLEGEHILDLHSPTHIDAGITDNSAGTLDVNIDDIGEDIVPYPRKITLIKQLAKSVIVGWEPPAVPPGWGTVSSYNVLVDKETRMNLTLGSRTKALIEKLNMAACTYRISVQCVTSRGSSDELQCTLLVGKDVVVAPSHLRVDNITQISAQLSWLPTNSNYSHVIFLNEEEFDIVKAARYKYQFFNLRPNMAYKVKVLAKPHQMPWQLPLEQREKKEAFVEFSTLPAGPPAPPQDVTVQAGVTPATIRVSWRPPVLTPTGLSNGANVTGYGVYAKGQRVAEVIFPTADSTAVELVRLRSLEAKGVTVRTLSAQGESVDSAVAAVPPELLVPPTPHPRPAPQSKPLASSGVPETKDEHLGPHARMDEAWEQSRAPGPVHGHMLEPPVGPGRRSPSPSRILPQPQGTPVSTTVAKAMAREAAQRVAESSRLEKRSVFLERSSAGQYAASDEEDAYDSPDFKRRGASVDDFLKGSELGKQMVS

SEQ ID NO: 34869 - protein, 1481 aa, Homo sapiens
  REGION 1..1481: note = ENSP00000430101
MSSAVGPRGPRPPTVPPPMQELPDLSHLTEEERNIIMAVMDRQKEEEEKEEAMLKCVVRDMAKPAACKTPRNAENQPHQPSPRLHQQFESYKEQVRKIGEEARRYQGEHKDDAPTCGICHKTKFADGCGHLCSYCRTKFCARCGGRVSLRSNNEDKVVMWVCNLCRKQQEILTKSGAWFFGSGPQQTSQDGTLSDTATGAGSEVPREKKARLQERSRSQTPLSTAAASSQDAAPPSAPPDRSKGAEPSQQALGPEQKQASSRSRSEPPRERKKTPGLSEQNGKGALKSERKRVPKTSAQPVEGAVEERERKERRESRRLEKGRSQDYPDTPEKRDEGKAADEEKQRKEEDYQTRYRSDPNLARYPVKPPPEEQQMRMHARVSRARHERRHSDVALPRTEAGAALPEGKAGKRAPAAARASPPDSPRAYSAERTAETRAPGAKQLTNHSPPAPRHGPVPAEAPELKAQEPLRKQSRLDPSSAVLMRKAKREKVETMLRNDSLSSDQSESVRPSPPKPHRSKRGGKKRQMSVSSSEEEGVSTPEYTSCEDVELESESVSEKGDLDYYWLDPATWHSRETSPISSHPVTWQPSKEGDRLIGRVILNKRTTMPKDSGALLGLKVVGGKMTDLGRLGAFITKVKKGSLADVVGHLRAGDEVLEWNGKPLPGATNEEVYNIILESKSEPQVEIIVSRPIGDIPRIPESSHPPLESSSSSFESQKMERPSISVISPTSPGALKDAPQVLPGQLSVKLWYDKVGHQLIVNVLQATDLPARVDGRPRNPYVKMYFLPDRSDKSKRRTKTVKKILEPKWNQTFVYSHVHRRDFRERMLEITVWDQPRVQEEESEFLGEILIELETALLDDEPHWYKLQTHDESSLPLPQPSPFMPRRHIHGESSSKKLQRSQRISDSDISDYEVDDGIGVVPPVGYRSSARESKSTTLTVPEQQRTTHHRSRSVSPHRGNDQGKPRSRLPNVPLQRSLDEIHPTRRSRSPTRHHDASRSPVDHRTRDVDSQYLSEQDSELLMLPRAKRGRSAECLHTTSELQPFLDRARSASTNCLRPDTSLHSPERERMHRQRSPTQSPPADTSFSSRRGRQLPQVPVRSGSIEQASLVVEERTRQMKMKVHRFKQTTGSGSSQELDREQYSKYNIHKDQYRSCDNVSAKSSDSDVSDVSAISRTSSASRLSSTSFMSEQSERPRGRISSFTPKMQGRRMGTSGRSIMKSTSVSGEMYTLEHNDGSQSDTAVGTVGAGGKKRRSSLSAKVVAIVSRRSRSTSQLSQTESGHKKLKSTIQRSTETGMAAEMRKMVRQPSRESTDGSINSYSSEGNLIFPGVRLGADSQFSDFLDGLGPAQLVGRQTLATPAMAPYVKVYLLENGACIAKKKTRIARKTLDPLYQQSLVFDESPQGKVLQVIVWGDYGRMDHKCFMGVAQILLEELDLSSMVIGWYKLFPPSSLVDPTLTPLTRRASQSSLESSTGPPCIRS

SEQ ID NO: 34870 - protein, 1475 aa, Homo sapiens
  REGION 1..1475: note = ENSP00000429959
MSSAVGPRGPRPPTVPPPMQELPDLSHLTEEERNIIMAVMDRQKEEEEKEEAMLKCVVRDMAKPAACKTPRNAENQPHQPSPRLHQQFESYKEQVRKIGEEARRYQGEHKDDAPTCGICHKTKFADGCGHLCSYCRTKFCARCGGRVSLRSNNEDKVVMWVCNLCRKQQEILTKSGAWFFGSGPQQTSQDGTLSDTATGAGSEVPREKKARLQERSRSQTPLSTAAASSQDAAPPSAPPDRSKGAEPSQQALGPEQKQASSRSRSEPPRERKKTPGLSEQNGKGALKSERKRVPKTSAQPVEGAVEERERKERRESRRLEKGRSQDYPDTPEKRDEGKAADEEKQRKEEDYQTRYRSDPNLARYPVKPPPEEQQMRMHARVSRARHERRHSDVALPRTEAGAALPEGKAGKRAPAAARASPPDSPRAYSAERTAETRAPGAKQLTNHSPPAPRHGPVPAEAPELKAQEPLRKQSRLDPSSAVLMRKAKREKVETMLRNDSLSSDQSESVRPSPPKPHRSKRGGKKRQMSVSSSEEEGVSTPEYTSCEDVELESESVSEKGDLDYYWLDPATWHSRETSPISSHPVTWQPSKEGDRLIGRVILNKRTTMPKDSGALLGLKVVGGKMTDLGRLGAFITKVKKGSLADVVGHLRAGDEVLEWNGKPLPGATNEEVYNIILESKSEPQVEIIVSRPIGDIPRIPESSHPPLESSSSSFESQKMERPSISVISPTSPGALKDAPQVLPGQLSVKLWYDKVGHQLIVNVLQATDLPARVDGRPRNPYVKMYFLPDRSDKSKRRTKTVKKILEPKWNQTFVYSHVHRRDFRERMLEITVWDQPRVQEEESEFLGEILIELETALLDDEPHWYKLQTHDESSLPLPQPSPFMPRRHIHGESSSKKLQRSQRISDSDISDYEVDDGIGVVPPGYRSSARESKSTTLTVPEQQRTTHHRSRSVSPHRGNDQGKPRSRLPNVPLQRSLDEIHPTRRSRSPTRHHDASRSPVDHRTRDVDSQYLSEQDSELLMLPRAKRGRSAECLHTTRMHRQRSPTQSPPADTSFSSRRGRQLPQVPVRSGSIEQASLVVEERTRQMKMKVHRFKQTTGSGSSQELDREQYSKYNIHKDQYRSCDNVSAKSSDSDVSDVSAISRTSSASRLSSTSFMSEQSERPRGRIRRMGTSGRSIMKSTSVSGEMYTLEHNDGSQSDTAVGTVGAGGKKRRSSLSAKVVAIVSRRSRSTSQLSQTESGHKKLKSTIQRSTETGMAAEMRKMVRQPSRESTDGSINSYSSEGNLIFPGVRLGADSQFSDFLDGLGPAQLVGRQTLATPAMGDIQIGMEDKKGQLEVEVIRARSLTQKPGSKSTPAPYVKVYLLENGACIAKKKTRIARKTLDPLYQQSLVFDESPQGKVLQVIVWGDYGRMDHKCFMGVAQILLEELDLSSMVIGWYKLFPPSSLVDPTLTPLTRRASQSSLESSTGPPCIRS

SEQ ID NO: 34871 - protein, 1371 aa, Homo sapiens
  REGION 1..1371: note = ENSP00000430408
MSSAVGPRGPRPPTVPPPMQELPDLSHLTEEERNIIMAVMDRQKEEEEKEEAMLKCVVRDMAKPAACKTPRNAENQPHQPSPRLHQQFESYKEQVRKIGEEARRYQGEHKDDAPTCGICHKTKFADGCGHLCSYCRTKFCARCGGRVSLRSNNEDKVVMWVCNLCRKQQEILTKSGAWFFGSGPQQTSQDGTLSDTATGAGSEVPREKKARLQERSRSQTPLSTAAASSQDAAPPSAPPDRSKGAEPSQQALGPEQKQASSRSRSEPPRERKKTPGLSEQNGKGALKSERKRVPKTSAQPVEGAVEERERKERRESRRLEKGRSQDYPDTPEKRDEGKAADEEKQRKEEDYQTRYRSDPNLARYPVKPPPEEQQMRMHARVSRARHERRHSDVALPRTEAGAALPEGKAGKRAPAAARASPPDSPRAYSAERTAETRAPGAKQLTNHSPPAPRHGPVPAEAPELKAQEPLRKQSRLDPSSAVLMRKAKREKVETMLRNDSLSSDQSESVRPSPPKPHRSKRGGKKRQMSVSSSEEEGVSTPEYTSCEDVELESESVSEKGDLDYYWLDPATWHSRETSPISSHPVTWQPSKEGDRLIGRVILNKRTTMPKDSGALLGLKVVGGKMTDLGRLGAFITKVKKGSLADVVGHLRAGDEVLEWNGKPLPGATNEEVYNIILESKSEPQVEIIVSRPIGDIPRIPESSHPPLESSSSSFESQKMERPSISVISPTSPGALKDAPQVLPGQLSVKLWYDKVGHQLIVNVLQATDLPARVDGRPRNPYVKMYFLPDRSDKSKRRTKTVKKILEPKWNQTFVYSHVHRRDFRERMLEITVWDQPRVQEEESEFLGEILIELETALLDDEPHWYKLQTHDESSLPLPQPSPFMPRRHIHGESSSKKLQRSQRISDSDISDYEVDDGIGVVPPVGYRSSARESKSTTLTVPEQQRTTHHRSRSVSPHRGNDQGKPRSRLPNVPLQRSLDEIHPTRRSRSPTRHHDASRSPVDHRTRDVDSQYLSEQDSELLMLPRAKRGRSAECLHTTSELQPFLDRARSASTNCLRPDTSLHSPERERGRWSPSLDRRRPPSPRIQIQHASPENDRMHRQRSPTQSPPADTSFSSRRGRQLPQVPVRSGSIEQESGHKKLKSTIQRSTETGMAAEMRKMVRQPSRESTDGSINSYSSEGNLIFPGVRLGADSQFSDFLDGLGPAQLVGRQTLATPAMGDIQIGMEDKKGQLEVEVIRARSLTQKPGSKSTPAPYVKVYLLENGACIAKKKTRIARKTLDPLYQQSLVFDESPQGKVLQVIVWGDYGRMDHKCFMGVAQILLEELDLSSMVIGWYKLFPPSSLVDPTLTPLTRRASQSSLESSTGPPCIRS

SEQ ID NO: 34872 - protein, 1291 aa, Homo sapiens
  REGION 1..1291: note = ENSP00000430932
MSSAVGPRGPRPPTVPPPMQELPDLSHLTEEERNIIMAVMDRQKEEEEKEEAMLKCVVRDMAKPAACKTPRNAENQPHQPSPRLHQQFESYKEQVRKIGEEARRYQGEHKDDAPTCGICHKTKFADGCGHLCSYCRTKFCARCGGRVSLRSNNEDKVVMWVCNLCRKQQEILTKSGAWFFGSGPQQTSQDGTLSDTATGAGSEVPREKKARLQERSRSQTPLSTAAASSQDAAPPSAPPDRSKGAEPSQQALGPEQKQASSRSRSEPPRERKKTPGLSEQNGKGALKSERKRVPKTSAQPVEGAVEERERKERRESRRLEKGRSQDYPDTPEKRDEGKAADEEKQRKEEDYQTRYRSDPNLARYPVKPPPEEQQMRMHARVSRARHERRHSDVALPRTEAGAALPEGKAGKRAPAAARASPPDSPRAYSAERTAETRAPGAKQLTNHSPPAPRHGPVPAEAPELKAQEPLRKQSRLDPSSAVLMRKAKREKVETMLRNDSLSSDQSESVRPSPPKPHRSKRGGKKRQMSVSSSEEEGVSTPEYTSCEDVELESESVSEKGDLDYYWLDPATWHSRETSPISSHPVTWQPSKEGDRLIGRVILNKRTTMPKDSGALLGLKVVGGKMTDLGRLGAFITKVKKGSLADVVGHLRAGDEVLEWNGKPLPGATNEEVYNIILESKSEPQVEIIVSRPIGDIPRIPESSHPPLESSSSSFESQKMERPSISVISPTSPGALKDAPQVLPGQLSVKLWYDKVGHQLIVNVLQATDLPARVDGRPRNPYVKMYFLPDRSDKSKRRTKTVKKILEPKWNQTFVYSHVHRRDFRERMLEITVWDQPRVQEEESEFLGEILIELETALLDDEPHWYKLQTHDESSLPLPQPSPFMPRRHIHGESSSKKLQRSQRISDSDISDYEVDDGIGVVPPGYRSSARESKSTTLTVPEQQRTTHHRSRSVSPHRGNDQGKPRSRLPNVPLQRSLDEIHPTRRSRSPTRHHDASRSPVDHRTRDVDSQYLSEQDRMHRQRSPTQSPPADTSFSSRRGRQLPQVPVRSGSIEQESGHKKLKSTIQRSTETGMAAEMRKMVRQPSRESTDGSINSYSSEGNLIFPGVRLGADSQFSDFLDGLGPAQLVGRQTLATPAMGDIQIGMEDKKGQLEVEVIRARSLTQKPGSKSTPAPYVKVYLLENGACIAKKKTRIARKTLDPLYQQSLVFDESPQGKVLQVIVWGDYGRMDHKCFMGVAQILLEELDLSSMVIGWYKLFPPSSLVDPTLTPLTRRASQSSLESSTGPPCIRS

SEQ ID NO: 34873 - protein, 1692 aa, Homo sapiens
  REGION 1..1692: note = ENSP00000428417
MSSAVGPRGPRPPTVPPPMQELPDLSHLTEEERNIIMAVMDRQKEEEEKEEAMLKCVVRDMAKPAACKTPRNAENQPHQPSPRLHQQFESYKEQVRKIGEEARRYQGEHKDDAPTCGICHKTKFADGCGHLCSYCRTKFCARCGGRVSLRSNNEDKVVMWVCNLCRKQQEILTKSGAWFFGSGPQQTSQDGTLSDTATGAGSEVPREKKARLQERSRSQTPLSTAAASSQDAAPPSAPPDRSKGAEPSQQALGPEQKQASSRSRSEPPRERKKTPGLSEQNGKGALKSERKRVPKTSAQPVEGAVEERERKERRESRRLEKGRSQDYPDTPEKRDEGKAADEEKQRKEEDYQTRYRSDPNLARYPVKPPPEEQQMRMHARVSRARHERRHSDVALPRTEAGAALPEGKAGKRAPAAARASPPDSPRAYSAERTAETRAPGAKQLTNHSPPAPRHGPVPAEAPELKAQEPLRKQSRLDPSSAVLMRKAKREKVETMLRNDSLSSDQSESVRPSPPKPHRSKRGGKKRQMSVSSSEEEGVSTPEYTSCEDVELESESVSEKGDLDYYWLDPATWHSRETSPISSHPVTWQPSKEGDRLIGRVILNKRTTMPKDSGALLGLKVVGGKMTDLGRLGAFITKVKKGSLADVVGHLRAGDEVLEWNGKPLPGATNEEVYNIILESKSEPQVEIIVSRPIGDIPRIPESSHPPLESSSSSFESQKMERPSISVISPTSPGALKDAPQVLPGQLSVKLWYDKVGHQLIVNVLQATDLPARVDGRPRNPYVKMYFLPDRSDKSKRRTKTVKKILEPKWNQTFVYSHVHRRDFRERMLEITVWDQPRVQEEESEFLGEILIELETALLDDEPHWYKLQTHDESSLPLPQPSPFMPRRHIHGESSSKKLQRSQRISDSDISDYEVDDGIGVVPPVGYRSSARESKSTTLTVPEQQRTTHHRSRSVSPHRGNDQGKPRSRLPNVPLQRSLDEIHPTRRSRSPTRHHDASRSPVDHRTRDVDSQYLSEQDSELLMLPRAKRGRSAECLHTTRHLVRHYKTLPPKMPLLQSSSHWNIYSSILPAHTKTKSVTRQDISLHHECFNSTVLRFTDEILVSELQPFLDRARSASTNCLRPDTSLHSPERERGRWSPSLDRRRPPSPRIQIQHASPENDRHSRKSERSSIQKQTRKGTASDAERVLPTCLSRRGHAAPRATDQPVIRGKHPARSRSSEHSSIRTLCSMHHLVPGGSAPPSPLLTRMHRQRSPTQSPPADTSFSSRRGRQLPQVPVRSGSIEQASLVVEERTRQMKMKVHRFKQTTGSGSSQELDREQYSKYNIHKDQYRSCDNVSAKSSDSDVSDVSAISRTSSASRLSSTSFMSEQSERPRGRISSFTPKMQGRRMGTSGRSIMKSTSVSGEMYTLEHNDGSQSDTAVGTVGAGGKKRRSSLSAKVVAIVSRRSRSTSQLSQTESGHKKLKSTIQRSTETGMAAEMRKMVRQPSRESTDGSINSYSSEGNLIFPGVRLGADSQFSDFLDGLGPAQLVGRQTLATPAMGDIQIGMEDKKGQLEVEVIRARSLTQKPGSKSTPAPYVKVYLLENGACIAKKKTRIARKTLDPLYQQSLVFDESPQGKVLQVIVWGDYGRMDHKCFMGVAQILLEELDLSSMVIGWYKLFPPSSLVDPTLTPLTRRASQSSLESSTGPPCIRS

SEQ ID NO: 34874 - protein, 1342 aa, Homo sapiens
  REGION 1..1342: note = ENSP00000430502
MSSAVGPRGPRPPTVPPPMQELPDLSHLTEEERNIIMAVMDRQKEEEEKEEAMLKCVVRDMAKPAACKTPRNAENQPHQPSPRLHQQFESYKEQVRKIGEEARRYQGEHKDDAPTCGICHKTKFADGCGHLCSYCRTKFCARCGGRVSLRSNNEDKVVMWVCNLCRKQQEILTKSGAWFFGSGPQQTSQDGTLSDTATGAGSEVPREKKARLQERSRSQTPLSTAAASSQDAAPPSAPPDRSKGAEPSQQALGPEQKQASSRSRSEPPRERKKTPGLSEQNGKGALKSERKRVPKTSAQPVEGAVEERERKERRESRRLEKGRSQDYPDTPEKRDEGKAADEEKQRKEEDYQTRYRSDPNLARYPVKPPPEEQQMRMHARVSRARHERRHSDVALPRTEAGAALPEGKAGKRAPAAARASPPDSPRAYSAERTAETRAPGAKQLTNHSPPAPRHGPVPAEAPELKAQEPLRKQSRLDPSSAVLMRKAKREKVETMLRNDSLSSDQSESVRPSPPKPHRSKRGGKKRQMSVSSSEEEGVSTPEYTSCEDVELESESVSEKGDLDYYWLDPATWHSRETSPISSHPVTWQPSKEGDRLIGRVILNKRTTMPKDSGALLGLKVVGGKMTDLGRLGAFITKVKKGSLADVVGHLRAGDEVLEWNGKPLPGATNEEVYNIILESKSEPQVEIIVSRPIGDIPRIPESSHPPLESSSSSFESQKMERPSISVISPTSPGALKDAPQVLPGQLSVKLWYDKVGHQLIVNVLQATDLPARVDGRPRNPYVKMYFLPDRSDKSKRRTKTVKKILEPKWNQTFVYSHVHRRDFRERMLEITVWDQPRVQEEESEFLGEILIELETALLDDEPHWYKLQTHDESSLPLPQPSPFMPRRHIHGESSSKKLQRSQRISDSDISDYEVDDGIGVVPPGYRSSARESKSTTLTVPEQQRTTHHRSRSVSPHRGNDQGKPRSRLPNVPLQRSLDEIHPTRRSRSPTRHHDASRSPVDHRTRDVDSQYLSEQDSELLMLPRAKRGRSAECLHTTSELQPFLDRARSASTNCLRPDTSLHSPERERMHRQRSPTQSPPADTSFSSRRGRQLPQVPVRSGSIEQESGHKKLKSTIQRSTETGMAAEMRKMVRQPSRESTDGSINSYSSEGNLIFPGVRLGADSQFSDFLDGLGPAQLVGRQTLATPAMGDIQIGMEDKKGQLEVEVIRARSLTQKPGSKSTPAPYVKVYLLENGACIAKKKTRIARKTLDPLYQQSLVFDESPQGKVLQVIVWGDYGRMDHKCFMGVAQILLEELDLSSMVIGWYKLFPPSSLVDPTLTPLTRRASQSSLESSTGPPCIRS

SEQ ID NO: 34875 - protein, 1541 aa, Homo sapiens
  REGION 1..1541: note = ENSP00000264839
MSSAVGPRGPRPPTVPPPMQELPDLSHLTEEERNIIMAVMDRQKEEEEKEEAMLKCVVRDMAKPAACKTPRNAENQPHQPSPRLHQQFESYKEQVRKIGEEARRYQGEHKDDAPTCGICHKTKFADGCGHLCSYCRTKFCARCGGRVSLRSNNEDKVVMWVCNLCRKQQEILTKSGAWFFGSGPQQTSQDGTLSDTATGAGSEVPREKKARLQERSRSQTPLSTAAASSQDAAPPSAPPDRSKGAEPSQQALGPEQKQASSRSRSEPPRERKKTPGLSEQNGKGALKSERKRVPKTSAQPVEGAVEERERKERRESRRLEKGRSQDYPDTPEKRDEGKAADEEKQRKEEDYQTRYRSDPNLARYPVKPPPEEQQMRMHARVSRARHERRHSDVALPRTEAGAALPEGKAGKRAPAAARASPPDSPRAYSAERTAETRAPGAKQLTNHSPPAPRHGPVPAEAPELKAQEPLRKQSRLDPSSAVLMRKAKREKVETMLRNDSLSSDQSESVRPSPPKPHRSKRGGKKRQMSVSSSEEEGVSTPEYTSCEDVELESESVSEKGDLDYYWLDPATWHSRETSPISSHPVTWQPSKEGDRLIGRVILNKRTTMPKDSGALLGLKVVGGKMTDLGRLGAFITKVKKGSLADVVGHLRAGDEVLEWNGKPLPGATNEEVYNIILESKSEPQVEIIVSRPIGDIPRIPESSHPPLESSSSSFESQKMERPSISVISPTSPGALKDAPQVLPGQLSVKLWYDKVGHQLIVNVLQATDLPARVDGRPRNPYVKMYFLPDRSDKSKRRTKTVKKILEPKWNQTFVYSHVHRRDFRERMLEITVWDQPRVQEEESEFLGEILIELETALLDDEPHWYKLQTHDESSLPLPQPSPFMPRRHIHGESSSKKLQRSQRISDSDISDYEVDDGIGVVPPVGYRSSARESKSTTLTVPEQQRTTHHRSRSVSPHRGNDQGKPRSRLPNVPLQRSLDEIHPTRRSRSPTRHHDASRSPVDHRTRDVDSQYLSEQDSELLMLPRAKRGRSAECLHTTRHLVRHYKTLPPKMPLLQSSSHWNIYSELQPFLDRARSASTNCLRPDTSLHSPERERMHRQRSPTQSPPADTSFSSRRGRQLPQVPVRSGSIEQASLVVEERTRQMKMKVHRFKQTTGSGSSQELDREQYSKYNIHKDQYRSCDNVSAKSSDSDVSDVSAISRTSSASRLSSTSFMSEQSERPRGRISSFTPKMQGRRMGTSGRSIMKSTSVSGEMYTLEHNDGSQSDTAVGTVGAGGKKRRSSLSAKVVAIVSRRSRSTSQLSQTESGHKKLKSTIQRSTETGMAAEMRKMVRQPSRESTDGSINSYSSEGNLIFPGVRLGADSQFSDFLDGLGPAQLVGRQTLATPAMGDIQIGMEDKKGQLEVEVIRARSLTQKPGSKSTPAPYVKVYLLENGACIAKKKTRIARKTLDPLYQQSLVFDESPQGKVLQVIVWGDYGRMDHKCFMGVAQILLEELDLSSMVIGWYKLFPPSSLVDPTLTPLTRRASQSSLESSTGPPCIRS

SEQ ID NO: 34876 - protein, 1038 aa, Homo sapiens
  REGION 1..1038: note = ENSP00000430359
  VARIANT 1: note = Any amino acid
XYSAERTAETRAPGAKQLTNHSPPAPRHGPVPAEAPELKAQEPLRKQSRLDPSSAVLMRKAKREKVETMLRNDSLSSDQSESVRPSPPKPHRSKRGGKKRQMSVSSSEEEGVSTPEYTSCEDVELESESVSEKGDLDYYWLDPATWHSRETSPISSHPVTWQPSKEGDRLIGRVILNKRTTMPKDSGALLGLKVVGGKMTDLGRLGAFITKVKKGSLADVVGHLRAGDEVLEWNGKPLPGATNEEVYNIILESKSEPQVEIIVSRPIGDIPRIPESSHPPLESSSSSFESQKMERPSISVISPTSPGALKDAPQVLPGQLSVKLWYDKVGHQLIVNVLQATDLPARVDGRPRNPYVKMYFLPDRSDKSKRRTKTVKKILEPKWNQTFVYSHVHRRDFRERMLEITVWDQPRVQEEESEFLGEILIELETALLDDEPHWYKLQTHDESSLPLPQPSPFMPRRHIHGESSSKKLQRSQRISDSDISDYEVDDGIGVVPPVGYRSSARESKSTTLTVPEQQRTTHHRSRSVSPHRGNDQGKPRSRLPNVPLQRSLDEIHPTRRSRSPTRHHDASRSPVDHRTRDVDSQYLSEQDRMHRQRSPTQSPPADTSFSSRRGRQLPQVPVRSGSIEQASLVVEERTRQMKMKVHRFKQTTGSGSSQELDREQYSKYNIHKDQYRSCDNVSAKSSDSDVSDVSAISRTSSASRLSSTSFMSEQSERPRGRISSFTPKMQGRRMGTSGRSIMKSTSVSGEMYTLEHNDGSQSDTAVGTVGAGGKKRRSSLSAKVVAIVSRRSRSTSQLSQTESGHKKLKSTIQRSTETGMAAEMRKMVRQPSRESTDGSINSYSSEGNLIFPGVRLGADSQFSDFLDGLGPAQLVGRQTLATPAMGDIQIGMEDKKGQLEVEVIRARSLTQKPGSKSTPAPYVKVYLLENGACIAKKKTRIARKTLDPLYQQSLVFDESPQGKVLQVIVWGDYGRMDHKCFMGVAQILLEELDLSSMVIGWYKLFPPSSLVDPTLTPLTRRASQSSLESSTGPPCIRS

SEQ ID NO: 34877 - protein, 1012 aa, Homo sapiens
  REGION 1..1012: note = ENSP00000385649
MCAPGIHVSSEGWEEVRSVDSEEGTIEARRAVAGDLDYYWLDPATWHSRETSPISSHPVTWQPSKEGDRLIGRVILNKRTTMPKDSGALLGLKVVGGKMTDLGRLGAFITKVKKGSLADVVGHLRAGDEVLEWNGKPLPGATNEEVYNIILESKSEPQVEIIVSRPIGDIPRIPESSHPPLESSSSSFESQKMERPSISVISPTSPGALKDAPQVLPGQLSVKLWYDKVGHQLIVNVLQATDLPARVDGRPRNPYVKMYFLPDRSDKSKRRTKTVKKILEPKWNQTFVYSHVHRRDFRERMLEITVWDQPRVQEEESEFLGEILIELETALLDDEPHWYKLQTHDESSLPLPQPSPFMPRRHIHGESSSKKLQRSQRISDSDISDYEVDDGIGVVPPGYRSSARESKSTTLTVPEQQRTTHHRSRSVSPHRGNDQGKPRSRLPNVPLQRSLDEIHPTRRSRSPTRHHDASRSPVDHRTRDVDSQYLSEQDSELLMLPRAKRGRSAECLHTTSELQPFLDRARSASTNCLRPDTSLHSPERERHSRKSERSSIQKQTRKGTASDAERMHRQRSPTQSPPADTSFSSRRGRQLPQVPVRSGSIEQASLVVEERTRQMKMKVHRFKQTTGSGSSQELDREQYSKYNIHKDQYRSCDNVSAKSSDSDVSDVSAISRTSSASRLSSTSFMSEQSERPRGRISSFTPKMQGRRMGTSGRSIMKSTSVSGEMYTLEHNDGSQSDTAVGTVGAGGKKRRSSLSAKVVAIVSRRSRSTSQLSQTESGHKKLKSTIQRSTETGMAAEMRKMVRQPSRESTDGSINSYSSEGNLIFPGVRLGADSQFSDFLDGLGPAQLVGRQTLATPAMGDIQIGMEDKKGQLEVEVIRARSLTQKPGSKSTPAPYVKVYLLENGACIAKKKTRIARKTLDPLYQQSLVFDESPQGKVLQVIVWGDYGRMDHKCFMGVAQILLEELDLSSMVIGWYKLFPPSSLVDPTLTPLTRRASQSSLESSTGPPCIRS

SEQ ID NO: 34878 - protein, 817 aa, Homo sapiens
  REGION 1..817: note = ENSP00000428328
MCAPGIHVSSEGWEEVRSVDSEEGTIEARRAVAGDLDYYWLDPATWHSRETSPISSHPVTWQPSKEGDRLIGRVILNKRTTMPKDSGALLGLKVVGGKMTDLGRLGAFITKVKKGSLADVVGHLRAGDEVLEWNGKPLPGATNEEVYNIILESKSEPQVEIIVSRPIGDIPRIPESSHPPLESSSSSFESQKMERPSISVISPTSPGALKDAPQVLPGQLSVKLWYDKVGHQLIVNVLQATDLPARVDGRPRNPYVKMYFLPDRSDKSKRRTKTVKKILEPKWNQTFVYSHVHRRDFRERMLEITVWDQPRVQEEESEFLGEILIELETALLDDEPHWYKLQTHDESSLPLPQPSPFMPRRHIHGESSSKKLQRSQRISDSDISDYEVDDGIGVVPPVGYRSSARESKSTTLTVPEQQRTTHHRSRSVSPHRGNDQGKPRSRLPNVPLQRSLDEIHPTRRSRSPTRHHDASRSPVDHRTRDVDSQYLSEQDSELLMLPRAKRGRSAECLHTTSELQPFLDRARSASTNCLRPDTSLHSPERERMHRQRSPTQSPPADTSFSSRRGRQLPQVPVRSGSIEQESGHKKLKSTIQRSTETGMAAEMRKMVRQPSRESTDGSINSYSSEGNLIFPGVRLGADSQFSDFLDGLGPAQLVGRQTLATPAMGDIQIGMEDKKGQLEVEVIRARSLTQKPGSKSTPAPYVKVYLLENGACIAKKKTRIARKTLDPLYQQSLVFDESPQGKVLQVIVWGDYGRMDHKCFMGVAQILLEELDLSSMVIGWYKLFPPSSLVDPTLTPLTRRASQSSLESSTGPPCIRS

SEQ ID NO: 34879 - protein, 760 aa, Homo sapiens
  REGION 1..760: note = ENSP00000411235
MPKDSGALLGLKVVGGKMTDLGRLGAFITKVKKGSLADVVGHLRAGDEVLEWNGKPLPGATNEEVYNIILESKSEPQVEIIVSRPIGDIPRIPESSHPPLESSSSSFESQKMERPSISVISPTSPGALKDAPQVLPGQLSVKLWYDKVGHQLIVNVLQATDLPARVDGRPRNPYVKMYFLPDRSDKSKRRTKTVKKILEPKWNQTFVYSHVHRRDFRERMLEITVWDQPRVQEEESEFLGEILIELETALLDDEPHWYKLQTHDESSLPLPQPSPFMPRRHIHGESSSKKLQRSQRISDSDISDYEVDDGIGVVPPVGYRSSARESKSTTLTVPEQQRTTHHRSRSVSPHRGNDQGKPRSRLPNVPLQRSLDEIHPTRRSRSPTRHHDASRSPVDHRTRDVDSQYLSEQDSELLMLPRAKRGRSAECLHTTSELQPFLDRARSASTNCLRPDTSLHSPERERHSRKSERSSIQKQTRKGTASDAERMHRQRSPTQSPPADTSFSSRRGRQLPQVPVRSGSIEQESGHKKLKSTIQRSTETGMAAEMRKMVRQPSRESTDGSINSYSSEGNLIFPGVRLGADSQFSDFLDGLGPAQLVGRQTLATPAMGDIQIGMEDKKGQLEVEVIRARSLTQKPGSKSTPAPYVKVYLLENGACIAKKKTRIARKTLDPLYQQSLVFDESPQGKVLQVIVWGDYGRMDHKCFMGVAQILLEELDLSSMVIGWYKLFPPSSLVDPTLTPLTRRASQSSLESSTGPPCIRS

SEQ ID NO: 34880 - protein, 753 aa, Homo sapiens
  REGION 1..753: note = ENSP00000389503
MPKDSGALLGLKVVGGKMTDLGRLGAFITKVKKGSLADVVGHLRAGDEVLEWNGKPLPGATNEEVYNIILESKSEPQVEIIVSRPIGDIPRIPESSHPPLESSSSSFESQKMERPSISVISPTSPGALKDAPQVLPGQLSVKLWYDKVGHQLIVNVLQATDLPARVDGRPRNPYVKMYFLPDRSDKSKRRTKTVKKILEPKWNQTFVYSHVHRRDFRERMLEITVWDQPRVQEEESEFLGEILIELETALLDDEPHWYKLQTHDESSLPLPQPSPFMPRRHIHGESSSKKLQRSQRISDSDISDYEVDDGIGVVPPVGYRSSARESKSTTLTVPEQQRTTHHRSRSVSPHRGNDQGKPRSRLPNVPLQRSLDEIHPTRRSRSPTRHHDASRSPVDHRTRDVDSQYLSEQDRMHRQRSPTQSPPADTSFSSRRGRQLPQVPVRSGSIEQASLVVEERTRQMKMKVHRFKQTTGSGSSQELDREQYSKYNIHKDQYRSCDNVSAKSSDSDVSDVSAISRTSSASRLSSTSFMSEQSERPRGRISSFTPKMQGRRMGTSGRSIMKSTSVSGEMYTLEHNDGSQSDTAVGTVGAGGKKRRSSLSAKVVAIVSRRSRSTSQLSQTESGHKKLKSTIQRSTETGMAAEMRKMVRQPSRESTDGSINSYSSEGNLIFPGVRLGADSQFSDFLDGLGPAQLVGRQTLATPAMGDIQIGMEDKKGQLEVEVIRARSLTQKPGSKSTPAPYVKVYLLENGACI

SEQ ID NO: 34881 - protein, 826 aa, Homo sapiens
  REGION 1..826: note = ENSP00000428367
MFAGFLQFLLLHTLHSGTGDLDYYWLDPATWHSRETSPISSHPVTWQPSKEGDRLIGRVILNKRTTMPKDSGALLGLKVVGGKMTDLGRLGAFITKVKKGSLADVVGHLRAGDEVLEWNGKPLPGATNEEVYNIILESKSEPQVEIIVSRPIGDIPRIPESSHPPLESSSSSFESQKMERPSISVISPTSPGALKDAPQVLPGQLSVKLWYDKVGHQLIVNVLQATDLPARVDGRPRNPYVKMYFLPDRSDKSKRRTKTVKKILEPKWNQTFVYSHVHRRDFRERMLEITVWDQPRVQEEESEFLGEILIELETALLDDEPHWYKLQTHDESSLPLPQPSPFMPRRHIHGESSSKKLQRSQRISDSDISDYEVDDGIGVVPPVGYRSSARESKSTTLTVPEQQRTTHHRSRSVSPHRGNDQGKPRSRLPNVPLQRSLDEIHPTRRSRSPTRHHDASRSPVDHRTRDVDSQYLSEQDSELLMLPRAKRGRSAECLHTTSELQPFLDRARSASTNCLRPDTSLHSPERERHSRKSERSSIQKQTRKGTASDAERMHRQRSPTQSPPADTSFSSRRGRQLPQVPVRSGSIEQESGHKKLKSTIQRSTETGMAAEMRKMVRQPSRESTDGSINSYSSEGNLIFPGVRLGADSQFSDFLDGLGPAQLVGRQTLATPAMGDIQIGMEDKKGQLEVEVIRARSLTQKPGSKSTPAPYVKVYLLENGACIAKKKTRIARKTLDPLYQQSLVFDESPQGKVLQVIVWGDYGRMDHKCFMGVAQILLEELDLSSMVIGWYKLFPPSSLVDPTLTPLTRRASQSSLESSTGPPCIRS

SEQ ID NO: 34882 - protein, 740 aa, Homo sapiens
  REGION 1..740: note = ENSP00000359448
RPRNPYVKMYFLPDRSDKSKRRTKTVKKILEPKWNQTFVYSHVHRRDFRERMLEITVWDQPRVQEEESEFLGEILIELETALLDDEPHWYKLQTHDESSLPLPQPSPFMPRRHIHGESSSKKLQRSQRISDSDISDYEVDDGIGVVPPVGYRSSARESKSTTLTVPEQQRTTHHRSRSVSPHRGNDQGKPRSRLPNVPLQRSLDEIHPTRRSRSPTRHHDASRSPVDHRTRDVDSQYLSEQDSELLMLPRAKRGRSAECLHTTSELQPFLDRARSASTNCLRPDTSLHSPERERMHRQRSPTQSPPADTSFSSRRGRQLPQVPVRSGSIEQASLVVEERTRQMKMKVHRFKQTTGSGSSQELDREQYSKYNIHKDQYRSCDNVSAKSSDSDVSDVSAISRTSSASRLSSTSFMSEQSERPRGRISSFTPKMQGRRMGTSGRSIMKSTSVSGEMYTLEHNDGSQSDTAVGTVGAGGKKRRSSLSAKVVAIVSRRSRSTSQLSQTESGHKKLKSTIQRSTETGMAAEMRKMVRQPSRESTDGSINSYSSEGNLIFPGVRLGADSQFSDFLDGLGPAQLVGRQTLATPAMGDIQIGMEDKKGQLEVEVIRARSLTQKPGSKSTPAPYVKVYLLENGACIAKKKTRIARKTLDPLYQQSLVFDESPQGKVLQVIVWGDYGRMDHKCFMGVAQILLEELDLSSMVIGWYKLFPPSSLVDPTLTPLTRRASQSSLESSTGPPCIRS

SEQ ID NO: 34883 - protein, 610 aa, Homo sapiens
  REGION 1..610: note = ENSP00000429338
  VARIANT 1: note = Any amino acid
XDYEVDDGIGVVPPVGYRSSARESKSTTLTVPEQQRTTHHRSRSVSPHRGNDQGKPRSRLPNVPLQRSLDEIHPTRRSRSPTRHHDASRSPVDHRTRDVDSQYLSEQDSELLMLPRAKRGRSAECLHTTRHSRKSERSSIQKQTRKGTASDAERMHRQRSPTQSPPADTSFSSRRGRQLPQVPVRSGSIEQEQEKYNSSTKASLVVEERTRQMKMKVHRFKQTTGSGSSQELDREQYSKYNIHKDQYRSCDNVSAKSSDSDVSDVSAISRTSSASRLSSTSFMSEQSERPRGRISSFTPKMQGRRMGTSGRSIMKSTSVSGEMYTLEHNDGSQSDTAVGTVGAGGKKRRSSLSAKVVAIVSRRSRSTSQLSQTESGHKKLKSTIQRSTETGMAAEMRKMVRQPSRESTDGSINSYSSEGNLIFPGVRLGADSQFSDFLDGLGPAQLVGRQTLATPAMGDIQIGMEDKKGQLEVEVIRARSLTQKPGSKSTPAPYVKVYLLENGACIAKKKTRIARKTLDPLYQQSLVFDESPQGKVLQVIVWGDYGRMDHKCFMGVAQILLEELDLSSMVIGWYKLFPPSSLVDPTLTPLTRRASQSSLESSTGPPCIRS

SEQ ID NO: 34884 - protein, 219 aa, Homo sapiens
  REGION 1..219: note = ENSP00000402273
MAAEMRKMVRQPSRESTDGSINSYSSEGNLIFPGVRLGADSQFSDFLDGLGPAQLVGRQTLATPAMGDIQIGMEDKKGQLEVEVIRARSLTQKPGSKSTPAPYVKVYLLENGACIAKKKTRIARKTLDPLYQQSLVFDESPQGKVLQVIVWGDYGRMDHKCFMGVAQILLEELDLSSMVIGWYKLFPPSSLVDPTLTPLTRRASQSSLESSTGPPCIRS

SEQ ID NO: 34885 - protein, 308 aa, Homo sapiens
  REGION 1..308: note = ENSP00000361769
MFNGEPGPASSGASRNVVRSSSISGEICGSQQAGGGAGTTTAKKRRSSLGAKMVAIVGLTQWSKSTLQLPQPEGATKKLRSNIRRSTETGIAVEMRSRVTRQGSRESTDGSTNSNSSDGTFIFPTTRLGAESQFSDFLDGLGPAQIVGRQTLATPPMGDVHIAIMDRSGQLEVEVIEARGLTPKPGSKSLPATYIKVYLLENGACLAKKKTKMTKKTCDPLYQQALLFDEGPQGKVLQVIVWGDYGRMDHKCFMGMAQIMLDELDLSAAVTGWYKLFPTSSVADSTLGSLTRRLSQSSLESATSPSCS

SEQ ID NO: 34886 - protein, 308 aa, Homo sapiens; identical to SEQ ID NO: 34885
  REGION 1..308: note = ENSP00000361768

SEQ ID NO: 34887 - protein, 269 aa, Homo sapiens
  REGION 1..269: note = ENSP00000361942
MERSQSRLSLSASFEALAIYFPCMNSFDDEDAGDSRRLKGAIQRSTETGLAVEMPSRTLRQASHESIEDSMNSYGSEGNLNYGGVCLASDAQFSDFLGSMGPAQFVGRQTLATTPMGDVEIGLQERNGQLEVDIIQARGLTAKPGSKTLPAAYIKAYLLENGICIAKKKTKVARKSLDPLYNQVLLFPESPQGKVLQVIVWGNYGRMERKQFMGVARVLLEELDLTTLAVGWYKLFPTSSMVDPATGPLLRQASQLSLESTVGPCGERS

SEQ ID NO: 34888 - protein, 270 aa, Homo sapiens
  REGION 1..270: note = ENSP00000439287
MERSQSRLSLSASFEALAIYFPCMNSFDDEDAEGDSRRLKGAIQRSTETGLAVEMPSRTLRQASHESIEDSMNSYGSEGNLNYGGVCLASDAQFSDFLGSMGPAQFVGRQTLATTPMGDVEIGLQERNGQLEVDIIQARGLTAKPGSKTLPAAYIKAYLLENGICIAKKKTKVARKSLDPLYNQVLLFPESPQGKVLQVIVWGNYGRMERKQFMGVARVLLEELDLTTLAVGWYKLFPTSSMVDPATGPLLRQASQLSLESTVGPCGERS

SEQ ID NO: 34889 - protein, 944 aa, Homo sapiens
  REGION 1..944: note = ENSP00000255006
MLDSFSQESTLPFREARKRTSFQPVQVWRNFTASQTTESPACSGASLGEMTAWTMGARGLDKRGSFFKLIDTIASEIGELKQEMVRTDVNLENGLEPAETHSMVRHKDGGYSEEEDVKTCARDSGYDSLSNRLSILDRLLHTHPIWLQLSLSEEEAAEVLQAQPPGIFLVHKSTKMQKKVLSLRLPCEFGAPLKEFAIKESTYTFSLEGSGISFADLFRLIAFYCISRDVLPFTLKLPYAISTAKSEAQLEELAQMGLNFWSSPADSKPPNLPPPHRPLSSDGVCPASLRQLCLINGVHSIKTRTPSELECSQTNGALCFINPLFLKVHSQDLSGGLKRPSTRTPNANGTERTRSPPPRPPPPAINSLHTSPRLARTETQTSMPETVNHNKHGNVALPGTKPTPIPPPRLKKQASFLEAEGGAKTLSGGRPGAGPELELGTAGSPGGAPPEAAPGDCTRAPPPSSESRPPCHGGRQRLSDMSISTSSSDSLEFDRSMPLFGYEADTNSSLEDYEGESDQETMAPPIKSKKKRSSSFVLPKLVKSQLQKVSGVFSSFMTPEKRMVRRIAELSRDKCTYFGCLVQDYVSFLQENKECHVSSTDMLQTIRQFMTQVKNYLSQSSELDPPIESLIPEDQIDVVLEKAMHKCILKPLKGHVEAMLKDFHMADGSWKQLKENLQLVRQRNPQELGVFAPTPDFVDVEKIKVKFMTMQKMYSPEKKVMLLLRVCKLIYTVMENNSGRMYGADDFLPVLTYVIAQCDMLELDTEIEYMMELLDPSLLHGEGGYYLTSAYGALSLIKNFQEEQAARLLSSETRDTLRQWHKRRTTNRTIPSVDDFQNYLRVAFQEVNSGCTGKTLLVRPYITTEDVCQICAEKFKVGDPEEYSLFLFVDETWQQLAEDTYPQKIKAELHSRPQPHIFHFVYKRIKNDPYGIIFQNGEEDLTTS

SEQ ID NO: 34890 - protein, 462 aa, Homo sapiens
  REGION 1..462: note = ENSP00000391239
MTAWTMGARGLDKRGSFFKLIDTIASEIGELKQEMVRTDVNLENGLEPAETHSMVRHKDGGYSEEEDVKTCARDSGYDSLSNRLSILDRLLHTHPIWLQLSLSEEEAAEVLQAQPPGIFLVHKSTKMQKKVLSLRLPCEFGAPLKEFAIKESTYNVVLEKAMHKCILKPLKGHVEAMLKDFHMADGSWKQLKENLQLVRQRNPQELGVFAPTPDFVDVEKIKVKFMTMQKMYSPEKKVMLLLRVCKLIYTVMENNSGRMYGADDFLPVLTYVIAQCDMLELDTEIEYMMELLDPSLLHGEGGYYLTSAYGALSLIKNFQEEQAARLLSSETRDTLRQWHKRRTTNRTIPSVDDFQNYLRVAFQEVNSGCTGKTLLVRPYITTEDVCQICAEKFKVGDPEEYSLFLFVDETWQQLAEDTYPQKIKAELHSRPQPHIFHFVYKRIKNDPYGIIFQNGEEDLTTS

SEQ ID NO: 34891 - protein, 217 aa, Homo sapiens
  REGION 1..217: note = ENSP00000321805
MEVENEASCSPGSASGGSREYKVVMLGAGGVGKSAMTMQFISHQFPDYHDPTIEDAYKTQVRIDNEPAYLDILDTAGQAEFTAMREQYMRGGEGFIICYSVTDRQSFQEAAKFKELIFQVRHTYEIPLVLVGNKIDLEQFRQVSTEEGLSLAQEYNCGFFETSAALRFCIDDAFHGLVREIRKKESMPSLMEKKLKRKDSLWKKLKGSLKKKRENMT

SEQ ID NO: 34892 - protein, 153 aa, Homo sapiens
  REGION 1..153: note = ENSP00000467217
MEVENEASCSPGSASGGSREYKVVMLGAGGVGKSAMTMQFISHQFPDYHDPTIEDAYKTQVRIDNEPAYLDILDTAGQAEFTAMREQYMRGGEGFIICYSVTDRQSFQEAAKFKELIFQVRHTYEIPLVLVGNKIDLEQFRQPTLKEFGREEF

SEQ ID NO: 34893 - protein, 169 aa, Homo sapiens
  REGION 1..169: note = ENSP00000466620
MEVENEASCSPGSASGGSREYKVVMLGAGGVGKSAMTMQFISHQFPDYHDPTIEDAYKTQVRIDNEPAYLDILDTAGQLCDWLKHRWEVELWEIRRTEKQNSQPCGSSTCEVGKASSSATPSLTVNHFRRLPSLKSSFFRSATPMKFPWCWWVTKLIWNSSARFLQKKA

SEQ ID NO: 34894 - protein, 317 aa, Homo sapiens
  REGION 1..317: note = ENSP00000268125
MSEGVGTFRMVPEEEQELRAQLEQLTTKDHGPVFGPCSQLPRHTLQKAKDELNEREETREEAVRELQEMVQAQAASGEELAVAVAERVQEKDSGFFLRFIRARKFNVGRAYELLRGYVNFRLQYPELFDSLSPEAVRCTIEAGYPGVLSSRDKYGRVVMLFNIENWQSQEITFDEILQAYCFILEKLLENEETQINGFCIIENFKGFTMQQAASLRTSDLRKMVDMLQDSFPARFKAIHFIHQPWYFTTTYNVVKPFLKSKLLERVFVHGDDLSGFYQEIDENILPSDFGGTLPKYDGKAVAEQLFGPQAQAENTAF

SEQ ID NO: 34895 - protein, 108 aa, Homo sapiens
  REGION 1..108: note = ENSP00000454740
  VARIANT 1: note = Any amino acid
XNGFCIIENFKGFTMQQAASLRTSDLRKMVDMLQPWYFTTTYNVVKPFLKSKLLERVFVHGDDLSGFYQEIDENILPSDFGGTLPKYDGKAVAEQLFGPQAQAENTAF

SEQ ID NO: 34896 - protein, 71 aa, Homo sapiens
  REGION 1..71: note = ENSP00000457251
MSEGVGTFRMVPEEEQELRAQLEQLTTKDHGPVFGPCSQLPRHTLQKAKDELNEREETREEPVPRGCPLHH

SEQ ID NO: 34897 - protein, 1914 aa, Homo sapiens
  REGION 1..1914: note = ENSP00000361857
MADGKGDAAAVAGAGAEAPAVAGAGDGVETESMVRGHRPVSPAPGASGLRPCLWQLETELREQEVSEVSSLNYCRSFCQTLLQYASNKNASEHIVYLLEVYRLAIQSFASARPYLTTECEDVLLVLGRLVLSCFELLLSVSESELPCEVWLPFLQSLQESHDALLEFGNNNLQILVHVTKEGVWKNPVLLKILSQQPVETEEVNKLIAQEGPSFLQMRIKHLLKSNCIPQATALSKLCAESKEISNVSSFQQAYITCLCSMLPNEDAIKEIAKVDCKEVLDIICNLESEGQDNTAFVLCTTYLTQQLQTASVYCSWELTLFWSKLQRRIDPSLDTFLERCRQFGVIAKTQQHLFCLIRVIQTEAQDAGLGVSILLCVRALQLRSSEDEEMKASVCKTIACLLPEDLEVRRACQLTEFLIEPSLDGFNMLEELYLQPDQKFDEENAPVPNSLRCELLLALKAHWPFDPEFWDWKTLKRHCHQLLGQEASDSDDDLSGYEMSINDTDVLESFLSDYDEGKEDKQYRRRDLTDQHKEKRDKKPIGSSERYQRWLQYKFFCLLCKRECIEARILHHSKMHMEDGIYTCPVCIKKFKRKEMFVPHVMEHVKMPPSRRDRSKKKLLLKGSQKGICPKSPSAIPEQNHSLNDQAKGESHEYVTFSKLEDCHLQDRDLYPCPGTDCSRVFKQFKYLSVHLKAEHQNNDENAKHYLDMKNRREKCTYCRRHFMSAFHLREHEQVHCGPQPYMCVSIDCYARFGSVNELLNHKQKHDDLRYKCELNGCNIVFSDLGQLYHHEAQHFRDASYTCNFLGCKKFYYSKIEYQNHLSMHNVENSNGDIKKSVKLEESATGEKQDCINQPHLLNQTDKSHLPEDLFCAESANSQIDTETAENLKENSDSNSSDQLSHSSSASMNEELIDTLDHSETMQDVLLSNEKVFGPSSLKEKCSSMAVCFDGTKFTCGFDGCGSTYKNARGMQKHLRKVHPYHFKPKKIKTKDLFPSLGNEHNQTTEKLDAEPKPCSDTNSDSPDEGLDHNIHIKCKREHQGYSSESSICASKRPCTEDTMLELLLRLKHLSLKNSITHGSFSGSLQGYPSSGAKSLQSVSSISDLNFQNQDENMPSQYLAQLAAKPFFCELQGCKYEFVTREALLMHYLKKHNYSKEKVLQLTMFQHRYSPFQCHICQRSFTRKTHLRIHYKNKHQIGSDRATHKLLDNEKCDHEGPCSVDRLKGDCSAELGGDPSSNSEKPHCHPKKDECSSETDLESSCEETESKTSDISSPIGSHREEQEGREGRGSRRTVAKGNLCYILNKYHKPFHCIHKTCNSSFTNLKGLIRHYRTVHQYNKEQLCLEKDKARTKRELVKCKKIFACKYKECNKRFLCSKALAKHCSDSHNLDHIEEPKVLSEAGSAARFSCNQPQCPAVFYTFNKLKHHLMEQHNIEGEIHSDYEIHCDLNGCGQIFTHRSNYSQHVYYRHKDYYDDLFRSQKVANERLLRSEKVCQTADTQGHEHQTTRRSFNAKSKKCGLIKEKKAPISFKTRAEALHMCVEHSEHTQYPCMVQGCLSVVKLESSIVRHYKRTHQMSSAYLEQQMENLVVCVKYGTKIKEEPPSEADPCIKKEENRSCESERTEHSHSPGDSSAPIQNTDCCHSSERDGGQKGCIESSSVFDADTLLYRGTLKCNHSSKTTSLEQCNIVQPPPPCKIENSIPNPNGTESGTYFTSFQLPLPRIKESETRQHSSGQENTVKNPTHVPKENFRKHSQPRSFDLKTYKPMGFESSFLKFIQESEEKEDDFDDWEPSEHLTLSNSSQSSNDLTGNVVANNMVNDSEPEVDIPHSSSDSTIHENLTAIPPLIVAETTTVPSLENLRVVLDKALTDCGELALKQLHYLRPVVVLERSKFSTPILDLFPTKKTDELCVGSS

SEQ ID NO: 34898 - protein, 123 aa, Homo sapiens
  REGION 1..123: note = ENSP00000464134
MPRPALSVTSFCHRLGKRERKQSFMGNSGNSWSHTPFPKLELGLGPQPMAPRELPTCSICLERLRDPISLDCGHDFCIRCFSTHRLPGCEPPCCPECRKICKQKRGLRSLGEKMKLLPQRPLP

SEQ ID NO: 34899 - protein, 631 aa, Homo sapiens
  REGION 1..631: note = ENSP00000454919
MPRPALSVTSFCHRLGKRERKQSFMGNSGNSWSHTPFPKLELGLGPQPMAPRELPTCSICLERLRDPISLDCGHDFCIRCFSTHRLPGCEPPCCPECRKICKQKRGLRSLGEKMKLLPQRPLPPALQETCPVRAEPLLLVRINASGGLILRMGAINRCLKHPLARDTPVCLLAVLGEQHSGKSFLLNHLLQGLPGLESGEGGRPRGGEASLQGCRWGANGLARGIWMWSHPFLLGKEGKKVAVFLVDTGDAMSPELSRETRIKLCALTTMLSSYQILSTSQELKDTDLDYLEMFVHVAEVMGKHYGMVPIQHLDLLVRDSSHPNKAGQGHVGNIFQRLSGRYPKVQELLQGKRARCCLLPAPGRRRMNQGHASPGDTDDDFRHLLGAYVSDVLSAAPQHAKSRCQGYWNEGRAVARGDRRLLTGQQLAQEIKNLSGWMGRTGPGFTSPDEMAAQLHDLRKVEAAKREFEEYVRQQDVATKRIFSALRVLPDTMRNLLSTQKDAILARHGVALLCKGRDQTLEALEAELQATAKAFMDSYTMRFCGHLAAVGGAVGAGLMGLAGGVVGAGMAAAALAAEAGMVAAGAAVGATGAAVVGGGVGAGLAATVGCMEKEEDERLLEGDREPLLQEE

SEQ ID NO: 34900 - protein, 155 aa, Homo sapiens
  REGION 1..155: note = ENSP00000256257
MHPFQWCNGCFCGLGLVSTNKSCSMPPISFQDLPLNIYMVIFGTGIFVFMLSLIFCCYFISKLRNQAQSERYGYKEVVLKGDAKKLQLYGQTCAVCLEDFKGKDELGVLPCQHAFHRKCLVKWLEVRCVCPMCNKPIASPSEATQNIGILLDELV

SEQ ID NO: 34901 - protein, 664 aa, Homo sapiens
  REGION 1..664: note = ENSP00000304051
MAAVGPPQQQVRMAHQQVWAALEVALRVPCLYIIDAIFNSYPDSSQSRFCIVLQIFLRLFGVFASSIVLILSQRSLFKFYTYSSAFLLAATSVLVNYYASLHIDFYGAYNTSAFGIELLPRKGPSLWMALIVLQLTFGIGYVTLLQIHSIYSQLIILDLLVPVIGLITELPLHIRETLLFTSSLILTLNTVFVLAVKLKWFYYSTRYVYLLVRHMYRIYGLQLLMEDTWKRIRFPDILRVFWLTRVTAQATVLMYILRMANETDSFFISWDDFWDLICNLIISGCDSTLTVLGMSAVISSVAHYLGLGILAFIGSTEEDDRRLGFVAPVLFFILALQTGLSGLRPEERLIRLSRNMCLLLTAVLHFIHGMTDPVLMSLSASHVSSFRRHFPVLFVSACLFILPVLLSYVLWHHYALNTWLFAVTAFCVELCLKVIVSLTVYTLFMIDGYYNVLWEKLDDYVYYVRSTGSIIEFIFGVVMFGNGAYTMMFESGSKIRAFMMCLHAYFNIYLQAKNGWKTFMNRRTAVKKINSLPEIKGSRLQEINDVCAICYHEFTTSARITPCNHYFHALCLRKWLYIQDTCPMCHQKVYIEDDIKDNSNVSNNNGFIPPNETPEEAVREAAAESDRELNEDDSTDCDDDVQRERNGVIQHTGAAAEEFNDDTD

SEQ ID NO: 34902 - protein, 68 aa, Homo sapiens
  REGION 1..68: note = ENSP00000429836
MALIVLQLTFGIGYVTLLQIHSIYSQLIILDLLVPVIGLITELPLHIRETLLFTSSLILTLNTVFVLA

SEQ ID NO: 34903 - protein, 203 aa, Homo sapiens
  REGION 1..203: note = ENSP00000316628
METLSQDSLLECQICFNYYSPRRRPKLLDCKHTCCSVCLQQMRTSQKDVRCPWCRGVTKLPPGFSVSQLPDDPEVLAVIAIPHTSEHTPVFIKLPSNGCYMLPLPISKERALLPGDMGCRLLPGSQQKSVTVVTIPAEQQPLQGGAPQEAVEEEQDRRGVVKSSTWSGVCTVILVACVLVFLLGIVLHNMSCISKRFTVISCG

SEQ ID NO: 34904 - protein, 114 aa, Homo sapiens
  REGION 1..114: note = ENSP00000466492
METLSQDSLLECQICFNYYSPRRRPKLLDCKHTCCSVCLQQMRTSQKDVRCPWCRGVTKLPPGFSVSQLPDDPEVLAVIAIPHTSEHTPVFIKLPSNGCYMLPLPISKERALLP

SEQ ID NO: 34905 - protein, 1623 aa, Homo sapiens
  REGION 1..1623: note = ENSP00000255324
MAAEASKTGPSRSSYQRMGRKSQPWGAAEIQCTRCGRRVSRSSGHHCELQCGHAFCELCLLMTEECTTIICPDCEVATAVNTRQRYYPMAGYIKEDSIMEKLQPKTIKNCSQDFKKTADQLTTGLERSASTDKTLLNSSAVMLDTNTAEEIDEALNTAHHSFEQLSIAGKALEHMQKQTIEERERVIEVVEKQFDQLLAFFDSRKKNLCEEFARTTDDYLSNLIKAKSYIEEKKNNLNAAMNIARALQLSPSLRTYCDLNQIIRTLQLTSDSELAQVSSPQLRNPPRLSVNCSEIICMFNNMGKIEFRDSTKCYPQENEIRQNVQKKYNNKKELSCYDTYPPLEKKKVDMSVLTSEAPPPPLQPETNDVHLEAKNFQPQKDVATASPKTIAVLPQMGSSPDVIIEEIIEDNVESSAELVFVSHVIDPCHFYIRKYSQIKDAKVLEKKVNEFCNRSSHLDPSDILELGARIFVSSIKNGMWCRGTITELIPIEGRNTRKPCSPTRLFVHEVALIQIFMVDFGNSEVLIVTGVVDTHVRPEHSAKQHIALNDLCLVLRKSEPYTEGLLKDIQPLAQPCSLKDIVPQNSNEGWEEEAKVEFLKMVNNKAVSMKVFREEDGVLIVDLQKPPPNKISSDMPVSLRDALVFMELAKFKSQSLRSHFEKNTTLHYHPPILPKEMTDVSVTVCHINSPGDFYLQLIEGLDILFLLKTIEEFYKSEDGENLEILCPVQDQACVAKFEDGIWYRAKVIGLPGHQEVEVKYVDFGNTAKITIKDVRKIKDEFLNAPEKAIKCKLAYIEPYKRTMQWSKEAKEKFEEKAQDKFMTCSVIKILEDNVLLVELFDSLGAPEMTTTSINDQLVKEGLASYEIGYILKDNSQKHIEVWDPSPEEIISNEVHNLNPVSAKSLPNENFQSLYNKELPVHICNVISPEKIYVQWLLTENLLNSLEEKMIAAYENSKWEPVKWENDMHCAVKIQDKNQWRRGQIIRMVTDTLVEVLLYDVGVELVVNVDCLRKLEENLKTMGRLSLECSLVDIRPAGGSDKWTATACDCLSLYLTGAVATIILQVDSEENNTTWPLPVKIFCRDEKGERVDVSKYLIKKGLALRERRINNLDNSHSLSEKSLEVPLEQEDSVVTNCIKTNFDPDKKTADIISEQKVSEFQEKILEPRTTRGYKPPAIPNMNVFEATVSCVGDDGTIFVVPKLSEFELIKMTNEIQSNLKCLGLLEPYFWKKGEACAVRGSDTLWYRGKVMEVVGGAVRVQYLDHGFTEKIPQCHLYPILLYPDIPQFCIPCQLHNTTPVGNVWQPDAIEVLQQLLSKRQVDIHIMELPKNPWEKLSIHLYFDGMSLSYFMAYYKYCTSEHTEEMLKEKPRSDHDKKYEEEQWEIRFEELLSAETDTPLLPPYLSSSLPSPGELYAVQVKHVVSPNEVYICLDSIETSNQSNQHSDTDDSGVSGESESESLDEALQRVNKKVEALPPLTDFRTEMPCLAEYDDGLWYRAKIVAIKEFNPLSILVQFVDYGSTAKLTLNRLCQIPSHLMRYPARAIKVLLAGFKPPLRDLGETRIPYCPKWSMEALWAMIDCLQGKQLYAVSMAPAPEQIVTLYDDEQHPVHMPLVEMGLADKDE

SEQ ID NO: 34906 - protein, 653 aa, Homo sapiens
  REGION 1..653: note = ENSP00000255325
MAAEASKTGPSRSSYQRMGRKSQPWGAAEIQCTRCGRRVSRSSGHHCELQCGHAFCELCLLMTEECTTIICPDCEVATAVNTRQRYYPMAGYIKEDSIMEKLQPKTIKNCSQDFKKTADQLTTGLERSASTDKTLLNSSAVMLDTNTAEEIDEALNTAHHSFEQLSIAGKALEHMQKQTIEERERVIEVVEKQFDQLLAFFDSRKKNLCEEFARTTDDYLSNLIKAKSYIEEKKNNLNAAMNIARALQLSPSLRTYCDLNQIIRTLQLTSDSELAQVSSPQLRNPPRLSVNCSEIICMFNNMGKIEFRDSTKCYPQENEIRQNVQKKYNNKKELSCYDTYPPLEKKKVDMSVLTSEAPPPPLQPETNDVHLEAKNFQPQKDVATASPKTIAVLPQMGSSPDVIIEEIIEDNVESSAELVFVSHVIDPCHFYIRKYSQIKDAKVLEKKVNEFCNRSSHLDPSDILELGARIFVSSIKNGMWCRGTITELIPIEGRNTRKPCSPTRLFVHEVALIQIFMVDFGNSEVLIVTGVVDTHVRPEHSAKQHIALNDLCLVLRKSEPYTEGLLKDIQPLAQPCSLKDIVPQNSNEGWEEEAKVEFLKMVNNKAVSMKVFREEDGVLIVDLQKPPPNKISSDMPVSLRDALVFMELAKDLI

SEQ ID NO: 34907 - protein, 855 aa, Homo sapiens
  REGION 1..855: note = ENSP00000388892
MTDVSVTVCHINSPGDFYLQLIEGLDILFLLKTIEEFYKSEDGENLEILCPVQDQACVAKFEDGIWYRAKVIGLPGHQEVEVKYVDFGNTAKITIKDVRKIKDEFLNAPEKAIKCKLAYIEPYKRTMQWSKEAKEKFEEKAQDKFMTCSVIKILEDNVLLVELFDSLGAPEMTTTSINDQLVKEGLASYEIGYILKDNSQKHIEVWDPSPEEIISNEVHNLNPVSAKSLPNENFQSLYNKELPVHICNVISPEKIYVQWLLTENLLNSLEEKMIAAYENSKWEPVKWENDMHCAVKIQDKNQWRRGQIIRMVTDTLVEVLLYDVGVELVVNVDCLRKLEENLKTMGRLSLECSLVDIRPAGGSDKWTATACDCLSLYLTGAVATIILQVDSEENNTTWPLPVKIFCRDEKGERVDVSKYLIKKGLALRERRINNLDNSHSLSEKSLEVPLEQEDSVVTNCIKTNFDPDKKTADIISEQKVSEFQEKILEPRTTRGYKPPAIPNMNVFEATVSCVGDDGTIFVVPKLSEFELIKMTNEIQSNLKCLGLLEPYFWKKGEACAVRGSDTLWYRGKVMEVVGGAVRVQYLDHGFTEKIPQCHLYPILLYPDIPQFCIPCQLHNTTPVGNVWQPDAIEVLQQLLSKRQVDIHIMELPKNPWEKLSIHLYFDGMSLSYFMAYYKYCTSEHTEEMLKEKPRSDHDKKYEEEQWEIRFEELLSAETDTPLLPPYLSSSLPSPGELYAVQVKHVVSPNEVYICLDSIETSNQSNQHSDTDDSGVSGESESESLDEALQRVNKKVEALPPLTDFRTEMPCLAEYDDGLWYRAKIVAIKEFNPLSILVQFVDYGSTAKLTLNRLKI

SEQ ID NO: 34908 - protein, 633 aa, Homo sapiens
  REGION 1..633: note = ENSP00000344776
MIAAYENSKWEPVKWENDMHCAVKIQDKNQWRRGQIIRMVTDTLVEVLLYDVGVELVVNVDCLRKLEENLKTMGRLSLECSLVDIRPAGGSDKWTATACDCLSLYLTGAVATIILQVDSEENNTTWPLPVKIFCRDEKGERVDVSKYLIKKGLALRERRINNLDNSHSLSEKSLEVPLEQEDSVVTNCIKTNFDPDKKTADIISEQKVSEFQEKILEPRTTRGYKPPAIPNMNVFEATVSCVGDDGTIFVVPKLSEFELIKMTNEIQSNLKCLGLLEPYFWKKGEACAVRGSDTLWYRGKVMEVVGGAVRVQYLDHGFTEKIPQCHLYPILLYPDIPQFCIPCQLHNTTPVGNVWQPDAIEVLQQLLSKRQVDIHIMKPRSDHDKKYEEEQWEIRFEELLSAETDTPLLPPYLSSSLPSPGELYAVQVKHVVSPNEVYICLDSIETSNQSNQHSDTDDSGVSGESESESLDEALQRVNKKVEALPPLTDFRTEMPCLAEYDDGLWYRAKIVAIKEFNPLSILVQFVDYGSTAKLTLNRLCQIPSHLMRYPARAIKVLLAGFKPPLRDLGETRIPYCPKWSMEALWAMIDCLQGKQLYAVSMAPAPEQIVTLYDDEQHPVHMPLVEMGLADKDE

SEQ ID NO: 34909 - protein, 51 aa, Homo sapiens
  REGION 1..51: note = ENSP00000417500
MASQPPEDTAESQASDELECKICYNRYNLKQRKPKVLECCHRVCAKCLYKI

SEQ ID NO: 34910 - protein, 247 aa, Homo sapiens
  REGION 1..247: note = ENSP00000420465
MASQPPEDTAESQASDELECKICYNRYNLKQRKPKVLECCHRVCAKCLYKIIDFGDSPQGVIVCPFCRFETCLPDDEVSSLPDDNNILVNLTCGGKGKKCLPENPTELLLTPKRLASLVSPSHTSSNCLVITIMEVQRESSPSLSSTPVVEFYRPASFDSVTTVSHNWTVWNCTSLLFQTSIRVLVWLLGLLYFSSLPLGIYLLVSKKVTLGVVFVSLVPSSLVILMVYGFCQCVCHEFLDCMAPPS

SEQ ID NO: 34911 - protein, 162 aa, Homo sapiens
  REGION 1..162: note = ENSP00000419329
MASQPPEDTAESQASDELECKICYNRYNLKQRKPKVLECCHRVCAKCLYKIIDFGDSPQGVIVCPFCRFETCLPDDEVSSLPDDNNILVNLTCGGKGKKCLPENPTELLLTPKRLASLVSPSHTSSNCLVITIMEVQRESSPSLSSTPVVEFYRPASFDSVT

SEQ ID NO: 34912 - protein, 13 aa, Homo sapiens
  REGION 1..13: note = ENSP00000417514
MASQPPEDTAESQ

SEQ ID NO: 34913 - protein, 82 aa, Homo sapiens
  REGION 1..82: note = ENSP00000418717
MASQPPEDTAESQASDELECKICYNRYNLKQRKPKVLECCHRVCAKCLYKIIDFGDSPQGVIVCPFCRFETCLPDDEVSSLP

SEQ ID NO: 34914 - protein, 247 aa, Homo sapiens; identical to SEQ ID NO: 34910
  REGION 1..247: note = ENSP00000443228

SEQ ID NO: 34915 - protein, 247 aa, Homo sapiens; identical to SEQ ID NO: 34910
  REGION 1..247: note = ENSP00000442021

SEQ ID NO: 34916 - protein, 247 aa, Homo sapiens; identical to SEQ ID NO: 34910
  REGION 1..247: note = ENSP00000441271

SEQ ID NO: 34917 - protein, 634 aa, Homo sapiens
  REGION 1..634: note = ENSP00000367173
MSGAIFGPLEGPSSLDAPSIHPLVCPLCHVQYERPCLLDCFHDFCAGCLRGRATDGRLTCPLCQHQTVLKGPSGLPPVDRLLQFLVDSSGDGVEAVRCANCDLECSEQDVETTYFCNTCGQPLCARCRDETHRARMFARHDIVALGQRSRDVPQKCTLHAEPYLLFSTDKKLLLCIRCFRDMQKESRAHCVDLESAYVQGCERLEQAVLAVKALQTATREAIALLQAMVEEVRHSAAEEEDAIHALFGSMQDRLAERKALLLQAVQSQYEEKDKAFKEQLSHLATLLPTLQVHLVICSSFLSLANKAEFLDLGYELMERLQGIVTRPHHLRPIQSSKIASDHRAEFARCLEPLLLLGPRRVAAAASGANTLAGGLGPKALTGPHCPSPVGKMSGSPVQKPTLHRSISTKVLLAEGENTPFAEHCRHYEDSYRHLQAEMQSLKDQVQELHRDLTKHHSLIKAEIMGDVLHKSLQLDVQIASEHASLEGMRVVFQEIWEEAYQRVANEQEIYEAQLHDLLQLRQENAYLTTITKQITPYVRSIAKVKERLEPRFQAPVDEQSESLQNTHDDSRNNAASARNNPGSVPEKREKTSEPKGNSWAPNGLSEEPLLKNMDHHRSKQKNGGDVPTWREHPT

SEQ ID NO: 34918 - protein, 52 aa, Homo sapiens
  REGION 1..52: note = ENSP00000425843
MANWVFCNRCFQPPHRTSCFSLTNCGHVYCDACLGKDRRRYPGILHEHRQSV

SEQ ID NO: 34919 - protein, 232 aa, Homo sapiens
  REGION 1..232: note = ENSP00000372428
MANWVFCNRCFQPPHRTSCFSLTNCGHVYCDACLGKGKKNECLICKAPCRTVLLSKHTDADIQAFFMSIDSLCKKYSRETSQILEFQEKHRKRLLAFYREKISRLEESLRKSVLQIEQLQSMRSSQQTAFSTIKSSVSTKPHGCLLPPHSSAPDRLESMEVDLSPSPIRKSEIAAGPARISMISPPQDGRMAPCARRVCHFQRFTMFLHRRLSSLAAPPSVQFWKARGTHQL

SEQ ID NO: 34920 - protein, 297 aa, Homo sapiens
  REGION 1..297: note = ENSP00000389709
MANWVFCNRCFQPPHRTSCFSLTNCGHVYCDACLGKGKKNECLICKAPCRTVLLSKHTDADIQAFFMSIDSLCKKYSRETSQILEFQEKHRKRLLAFYREKISRLEESLRKSVLQIEQLQSMRSSQQTAFSTIKSSVSTKPHGCLLPPHSSAPDRLESMEVDLSPSPIRKSEIAAGPARISMISPPQDGRMGPHLTASFCFIPWLTLSKPPVPGECVISRGSPCFCIDVCPHWLLLLAFSSGRHGELTNSKTLPIYAEVQRAVLFPFQQAEGTLDTFRTPAVSVVFPLCQFERKKSF

SEQ ID NO: 34921 - protein, 123 aa, Homo sapiens
  REGION 1..123: note = ENSP00000426115
MANWVFCNRCFQPPHRTSCFSLTNCGHVYCDACLGKGKKNECLICKAPCRTVLLSKHTDADIQAFFMSIDSLCKKYSRETSQILEFQEKHRKRLLAFYREKISRLEESLRKSVLQIEQLQSLR

SEQ ID NO: 34922 - protein, 52 aa, Homo sapiens; identical to SEQ ID NO: 34918
  REGION 1..52: note = ENSP00000423030

SEQ ID NO: 34923 - protein, 115 aa, Homo sapiens
  REGION 1..115: note = ENSP00000423560
MANWVFCNRCFQPPHRTSCFSLTNCGHVYCDACLGKGKKNECLICKAPCRTVLLSKHRPFPVSDSESPTARLYSCVRRAPWIPHRGTRVRLRRRTLWTRLLCTRVDFLHSLRPLP

SEQ ID NO: 34924 - protein, 273 aa, Homo sapiens
  REGION 1..273: note = ENSP00000327481
MANWVFCNRCFQPPHRTSCFSLTNCGHVYCDACLGKGKKNECLICKAPCRTVLLSKHTDADIQAFFMSIDSLCKKYSRETSQYLRLSRGCCRLKLCPATSSKEVPRGSTHGSQAAARDPQEHWVSTTRAPRPGCRRSQSQPEAQGNTIQDAPHPLTLLHPSRTLIHTKSPWGQKLLEFIKHVCYHRHQSHRPCAPGWFCQVLQRPGAVSGEKTQQTRPAPPATCLLCLSCLSGFRHGPWRSQALPSDLVAPLFVSYTVEVSITNAGWSFPAAV

SEQ ID NO: 34925 - protein, 58 aa, Homo sapiens
  REGION 1..58: note = ENSP00000487588
HRDCVDPWLMLQQTCPLCKFNVLGEHQGWGPSAYSACSSPDASLPVLLPLPCREPLLR

SEQ ID NO: 34926 - protein, 30 aa, Homo sapiens
  REGION 1..30: note = ENSP00000485721
HRDCVDPWLMLQQTCPLCKFNVLGNRYSDD

SEQ ID NO: 34927 - protein, 30 aa, Homo sapiens; identical to SEQ ID NO: 34926
  REGION 1..30: note = ENSP00000486757

SEQ ID NO: 34928 - protein, 34 aa, Homo sapiens
  REGION 1..34: note = ENSP00000396278
DCVDPWLMLQQTCPLCKFNVLDGGSPMARKVDGL

SEQ ID NO: 34929 - protein, 377 aa, Homo sapiens
  REGION 1..377: note = ENSP00000371800
MGPAARPALRSPPPPPPPPPSPLLLLLPLLPLWLGLAGPGAAADGSEPAAGAGRGGARAVRVDVRLPRQDALVLEGVRIGSEADPAPLLGGRLLLMDIVDAEQEAPVEGWIAVAYVGKEQAAQFHQENKGSGPQAYPKALVQQMRRALFLGASALLLLILNHNVVRELDISQLLLRPVIVLHYSSNVTKLLDALLQRTQATAEITSGESLSANIEWKLTLWTTCGLSKDGYGGWQDLVCLGGSRAQEQKPLQQLWNAILLVAMLLCTGLVVQAQRQASRQSQRELGGQVDLFKRRVVRRLASLKTRRCRLSRAAQGLPDPGAETCAVCLDYFCNKQWLRVLPCKHEFHRDCVDPWLMLQQTCPLCKFNVLGNRYSDD

SEQ ID NO: 34930 - protein, 343 aa, Homo sapiens
  REGION 1..343: note = ENSP00000215798
  VARIANT 1: note = Any amino acid
XVRLPRQDALVLEGVRIGSEADPAPLLGGRLLLMDIVDAEQEAPVEGWIAVAYVGKEQAAQFHQENKGSGPQAYPKALVQQMRRALFLGASALLLLILNHNVVRELDISQLLLRPVIVLHYSSNVTKLLDALLQRTQATAEITSGESLSANIEWKLTLWTTCGLSKDGYGGWQDLVCLGGSRAQEQKPLQQLWNAILLVAMLLCTGLVVQAQRQASRQSQRELGGQVDLFKRRVVRRLASLKTRRCRLSRAAQGLPDPGAETCAVCLDYFCNKQWLRVLPCKHEFHRDCVDPWLMLQQTCPLCKFNVLGEHQGWGPSAYSACSSPDASLPVLLPLPCREPLLR

SEQ ID NO: 34931 - protein, 99 aa, Homo sapiens
  REGION 1..99: note = ENSP00000404738
MDIVDAEQEAPVEGWIAVAYVGKEQAAQFHQENKGSGPQAYPKALVQQMRRALFLGASALLLLILNHNVVRELDISQLLLRPVIVLHYSSNVTKLLDAL

SEQ ID NO: 34932 - protein, 135 aa, Homo sapiens
  REGION 1..135: note = ENSP00000486180
MLPSGSRSPGELLPLLVQFPAMGNSYGAMTCLTRWLRRGQKGLDDVSRAANCTSSCQLCKRICPSALGVWRGWENPGHLISNPVPRWVPSTPMPWGPGQWAAGGCVLGTSPMVWFGDPFQEPRRGTHRSRARISM

SEQ ID NO: 34933 - protein, 542 aa, Homo sapiens
  REGION 1..542: note = ENSP00000428698
MGEEQSTVSGGGGPQESQTLASGTAGHPEPPRPQGDSARAPPLRAASAEPSGGGCGSDWGCADTSAPEPARSLGPPGWSKSRAPAQPAGLALTGPLNPQTLPLQLELEEEEEEAGDRKEGGDEQQEAPPGEELEPRTRVGAADGLVLDVLGQRRPSLAKRQVFCSVYCVESDLPEAPASEQLSPPASPPGAPPVLNPPSTRSSFPSPRLSLPTDSLSPDGGSIELEFYLAPEPFSMPSLLGAPPYSGLGGVGDPYVPLMVLMCRVCLEDKPIKPLPCCKKAVCEECLKVYLSAQVQLGQVEIKCPITECFEFLEETTVVYNLTHEDSIKYKYFLELGRIDSSTKPCPQCKHFTTFKKKGHIPTPSRSESKYKIQCPTCQFVWCFKCHSPWHEGVNCKEYKKGDKLLRHWASEIEHGQRNAQKCPKCKIHIQRTEGCDHMTCSQCNTNFCYRCGERYRQLRFFGDHTSNLSIFGCKYRYLPERPHLRRLVRGSVCAGKLFIAPLIMVLGLALGAIAVVIGLFVFPIYCLCKKQRKRSRTGMHW

SEQ ID NO: 34934 - protein, 78 aa, Homo sapiens
  REGION 1..78: note = ENSP00000429012
  VARIANT 1: note = Any amino acid
XVPLMVLMCRVCLEDKPIKPLPCCKKAVCEECLKVYLSAQAGVQWHDLGSRKPPHPRFKRFSCLSLPSSWDYRYNLAK

SEQ ID NO: 34935 - skipped

SEQ ID NO: 34936 - protein, 104 aa, Homo sapiens
  REGION 1..104: note = ENSP00000357399
MTCSQCNTNFCYRCGERYRQLRFFGDHTSNLSIFGCKYRYLPERPHLRRLVRGSVCAGKLFIAPLIMVLGLALGAIAVVIGLFVFPIYCLCKKQRKRSRTGMHW

SEQ ID NO: 34937 - protein, 275 aa, Homo sapiens
  REGION 1..275: note = ENSP00000352734
MKVQLGQVEIKCPITECFEFLEETTVVYNLTHEDSIKYKYFLELGRIDSSTKPCPQCKHFTTFKKKGHIPTPSRSESKYKIQCPTCQFVWCFKCHSPWHEGVNCKEYKKGDKLLRHWASEIEHGQRNAQKCPKCKIHIQRTEGCDHMTCSQCNTNFCYRCGERYRQLRFFGDHTSNLSIFGCKYRYLPERPHLRRLVRGSVCAGKLFIAPLIMVLGLALGAIAVVIVEEIKTYWNLISGRTRNQTQHLAPQPVLLSDMLYCLKQVFICISYLLPL

SEQ ID NO: 34938 - protein, 65 aa, Homo sapiens
  REGION 1..65: note = ENSP00000404282
  VARIANT 1: note = Any amino acid
XDSIKYKYFLELGRIDSSTKPCPQCKHFTTFKKKGHIPTPSRSESKYKQNGRMKWFQRLFGVISI

SEQ ID NO: 34939 - protein, 306 aa, Homo sapiens
  REGION 1..306: note = ENSP00000452812
MCRVCLEDKPIKPLPCCKKAVCEECLKVYLSAQVQLGQVEIKCPITECFEFLEETTVVYNLTHEDSIKYKYFLELGRIDSSTKPCPQCKHFTTFKKKGHIPTPSRSESKYKIQCPTCQFVWCFKCHSPWHEGVNCKEYKKGDKLLRHWASEIEHGQRNAQKCPKCKIHIQRTEGCDHMTCSQCNTNFCYRCGERYRQLRFFGDHTSNLSIFGCKYRYLPERPHLRRLVRGSVCAGKLFIAPLIMVLGLALGAIAVVIVEEIKTYWNLISGRTRNQTQHLAPQPVLLSDMLYCLKQVFICISYLLPL

SEQ ID NO: 34940 - protein, 566 aa, Homo sapiens
  REGION 1..566: note = ENSP00000347548
MDLHRAAFKMENSSYLPNPLASPALMVLASTAEASRDASIPCQQPRPFGVPVSVDKDVHIPFTNGSYTFASMYHRQGGVPGTFANRDFPPSLLHLHPQFAPPNLDCTPISMLNHSGVGAFRPFASTEDRESYQSAFTPAKRLKNCHDTESPHLRFSDADGKEYDFGTQLPSSSPGSLKVDDTGKKIFAVSGLISDREASSSPEDRNDRCKKKAAALFDSQAPICPICQVLLRPSELQEHMEQELEQLAQLPSSKNSLLKDAMAPGTPKSLLLSASIKREGESPTASPHSSATDDLHHSDRYQTFLRVRANRQTRLNARIGKMKRRKQDEGQREGSCMAEDDAVDIEHENNNRFEEYEWCGQKRIRATTLLEGGFRGSGFIMCSGKENPDSDADLDVDGDDTLEYGKPQYTEADVIPCTGEEPGEAKEREALRGAVLNGGPPSTRITPEFSKWASDEMPSTSNGESSKQEAMQKTCKNSDIEKITEDSAVTTFEALKARVRELERQLSRGDRYKCLICMDSYSMPLTSIQCWHVHCEECWLRTLGAKKLCPQCNTITAPGDLRRIYL

SEQ ID NO: 34941 - protein, 566 aa, Homo sapiens; identical to SEQ ID NO: 34940
  REGION 1..566: note = ENSP00000354872

SEQ ID NO: 34942 - protein, 121 aa, Homo sapiens
  REGION 1..121: note = ENSP00000411541
  VARIANT 1: note = Any amino acid
XEGESPTASPHSSATDDLHHSDRYQTFLRVRANRQTRLNARIGKMKRRKQDEGQVCPLCNRPLAGSEQEMSRHVEHCLSKREGSCMAEDDAVDIEHENNNRFEEYEWCGQKRIRATTLLEG

SEQ ID NO: 34943 - protein, 260 aa, Homo sapiens
  REGION 1..260: note = ENSP00000335580
MPRARSGRRSRGAGGREETFLRVRANRQTRLNARIGKMKRRKQDEGQVCPLCNRPLAGSEQEMSRHVEHCLSKREGSCMAEDDAVDIEHENNNRFEEYEWCGQKRIRATTLLEGGFRGSGFIMCSGKENPDSDADLDVDGDDTLEYGKPQYTEADVIPCTGEEPGEAKEREALRGAVLNGGPPSTRITPEFSKWASDEMPSTSNGESSKQEAMQKTCKNSDIEKITEDSAVTTFEALKARVRELERQLSRGDRYKCLICM

SEQ ID NO: 34944 - protein, 259 aa, Homo sapiens
  REGION 1..259: note = ENSP00000388533
MPRARSGRRSRGAGGREETFLRVRANRQTRLNARIGKMKRRKQDEGQREGSCMAEDDAVDIEHENNNRFEEYEWCGQKRIRATTLLEGGFRGSGFIMCSGKENPDSDADLDVDGDDTLEYGKPQYTEADVIPCTGEEPGEAKEREALRGAVLNGGPPSTRITPEFSKWASDEMPSTSNGESSKQEAMQKTCKNSDIEKITEDSAVTTFEALKARVRELERQLSRGDRYKCLICMDSYSMPLTSIQCWHVHCEECWLRTL

SEQ ID NO: 34945 - protein, 45 aa, Homo sapiens
  REGION 1..45: note = ENSP00000475383
MPRARSGRRSRGAGGREEVDLSASTSQPADPTECSDWENETEEAR

SEQ ID NO: 34946 - protein, 566 aa, Homo sapiens; identical to SEQ ID NO: 34940
  REGION 1..566: note = ENSP00000361321

SEQ ID NO: 34947 - protein, 354 aa, Homo sapiens
  REGION 1..354: note = ENSP00000391822
MWWRDLTRLRLWLKREAIPGEGRKAAKVNAGVGEKGIYTASSRGGPPSARSKAVTVVAEGAASRSWLSMDAPELGPGLVERLEQLATCPLCGGSFEDPVLLACEHSFCRACLARRWGTPPATGTEASPTACPCCGLPCPRRSLRSNVRLAVEVRISRELREKLAEPGARAGRRRGGRIPTMGCLDLPGEDMRKTWRRFEVPTSKSSNSEDDLPEDYPVVKKMLHRLTADLTLDPGTAHRRLLISADRRSVQLAPPGTPAPPDGPKRFDQLPAVLGAQGFGAGRHCWEVETADAASCRDSSGEDADDEESHYAVGAAGESVQRKGCAPGPLGERIFPLFCTCDPRAPLRIVPAES

SEQ ID NO: 34948 - protein, 420 aa, Homo sapiens
  REGION 1..420: note = ENSP00000398512
MWWRDLTRLRLWLKREAIPGEGRKAAKVNAGVGEKGIYTASSRGGPPSARSKAVTVVAEGAASRSWLSMDAPELGPGLVERLEQLATCPLCGGSFEDPVLLACEHSFCRACLARRWGTPPATGTEASPTACPCCGLPCPRRSLRSNVRLAVEVRISRELREKLAEPGARAGRRRGGRIPTMGCLDLPGEDMRKTWRRFEVPTSKSSNSEDDLPEDYPVVKKMLHRLTADLTLDPGTAHRRLLISADRRSVQLAPPGTPAPPDGPKRFDQLPAVLGAQGFGAGRHCWEVETADAASCRDSSGEDADDEESHYAVGAAGESVQRKGCVRLCPAGAVWAVEGRGGRLWALTAPEPTLLGGVEPPPRRIRVDLDWERGRVAFYDGRSLDLLYAFQAPGPLGERIFPLFCTCDPRAPLRIVPAES

SEQ ID NO: 34949 - protein, 420 aa, Homo sapiens; identical to SEQ ID NO: 34948
  REGION 1..420: note = ENSP00000393560

SEQ ID NO: 34950 - protein, 354 aa, Homo sapiens; identical to SEQ ID NO: 34947
  REGION 1..354: note = ENSP00000401131

SEQ ID NO: 34951 - protein, 354 aa, Homo sapiens; identical to SEQ ID NO: 34947
  REGION 1..354: note = ENSP00000392508

SEQ ID NO: 34952 - protein, 420 aa, Homo sapiens; identical to SEQ ID NO: 34948
  REGION 1..420: note = ENSP00000407291

SEQ ID NO: 34953 - protein, 354 aa, Homo sapiens
  REGION 1..354: note = ENSP00000407248
MWWRDLTRLRLWLKREAIPGEGRKAAKVNAGVGEKGIYTASSRGGPPSARSKAVTVVAEGAASRSWLSMDAPELGPGLVERLEQLATCPLCGGSFEDPVLLACEHSFCRACLARRWGTPPATGTEASPTACPCCGLPCPRRSLRSNVRLAVEVRISRELREKLAEPGARAGRRRGGRIPTMGCLDLPGEDMRKTWRRFEVPTSKSSNSEDDLPEDYPVVKKMLHRLTADLTLDPGTAHRRLLISADRRSVQLAPPGTPAPPDGPKRFNQLPAVLGAQGFGAGRHCWEVETADAASCRDSSGEDADDEESHYAVGAAGESVQRKGCAPGPLGERIFPLFCTCDPRAPLRIVPAES

SEQ ID NO: 34954 - protein, 420 aa, Homo sapiens
  REGION 1..420: note = ENSP00000408539
MWWRDLTRLRLWLKREAIPGEGRKAAKVNAGVGEKGIYTASSRGGPPSARSKAVTVVAEGAASRSWLSMDAPELGPGLVERLEQLATCPLCGGSFEDPVLLACEHSFCRACLARRWGTPPATGTEASPTACPCCGLPCPRRSLRSNVRLAVEVRISRELREKLAEPGARAGRRRGGRIPTMGCLDLPGEDMRKTWRRFEVPTSKSSNSEDDLPEDYPVVKKMLHRLTADLTLDPGTAHRRLLISADRRSVQLAPPGTPAPPDGPKRFNQLPAVLGAQGFGAGRHCWEVETADAASCRDSSGEDADDEESHYAVGAAGESVQRKGCVRLCPAGAVWAVEGRGGRLWALTAPEPTLLGGVEPPPRRIRVDLDWERGRVAFYDGRSLDLLYAFQAPGPLGERIFPLFCTCDPRAPLRIVPAES

SEQ ID NO: 34955 - protein, 354 aa, Homo sapiens
  REGION 1..354: note = ENSP00000365941
MWWRDLTRLRLWLKREAIPGEGRKAAKVNAGVGEKGIYTASSRGGPPSARSKAVTVVAEGAASRSWLSMDAPELGPGLVERLEQLATCPLCGGSFEDPVLLACEHSFCRACLARRWGTPPATGTEASPTACPCCGLPCPRRSLRSNVRLAVEVRISRELREKLAEPGARAGRRRGGRIPTMGCLDLPGEDMRKTWRRFEVPTPKSSNSEDDLPEDYPVVKKMLHRLTADLTLDPGTAHRRLLISTDRRSVQLAPPGTPAPPDGPKRFDQLPAVLGAQGFGAGRHCWEVETADAASCRDSSGEDEDDEESHYAVGAAGESVQRKGCAPGPLGERIFPLFCTCDPRAPLRIVPAES

SEQ ID NO: 34956 - protein, 420 aa, Homo sapiens
  REGION 1..420: note = ENSP00000373106
MWWRDLTRLRLWLKREAIPGEGRKAAKVNAGVGEKGIYTASSRGGPPSARSKAVTVVAEGAASRSWLSMDAPELGPGLVERLEQLATCPLCGGSFEDPVLLACEHSFCRACLARRWGTPPATGTEASPTACPCCGLPCPRRSLRSNVRLAVEVRISRELREKLAEPGARAGRRRGGRIPTMGCLDLPGEDMRKTWRRFEVPTPKSSNSEDDLPEDYPVVKKMLHRLTADLTLDPGTAHRRLLISTDRRSVQLAPPGTPAPPDGPKRFDQLPAVLGAQGFGAGRHCWEVETADAASCRDSSGEDEDDEESHYAVGAAGESVQRKGCVRLCPAGAVWAVEGRGGRLWALTAPEPTLLGGVEPPPRRIRVDLDWERGRVAFYDGRSLDLLYAFQAPGPLGERIFPLFCTCDPRAPLRIVPAES

SEQ ID NO: 34957 - protein, 354 aa, Homo sapiens; identical to SEQ ID NO: 34947
  REGION 1..354: note = ENSP00000365942

SEQ ID NO: 34958 - protein, 420 aa, Homo sapiens; identical to SEQ ID NO: 34948
  REGION 1..420: note = ENSP00000244360

SEQ ID NO: 34959 - protein, 420 aa, Homo sapiens; identical to SEQ ID NO: 34948
  REGION 1..420: note = ENSP00000395696

SEQ ID NO: 34960 - protein, 354 aa, Homo sapiens; identical to SEQ ID NO: 34947
  REGION 1..354: note = ENSP00000415281

SEQ ID NO: 34961 - protein, 354 aa, Homo sapiens; identical to SEQ ID NO: 34947
  REGION 1..354: note = ENSP00000405340

SEQ ID NO: 34962 - protein, 420 aa, Homo sapiens
  REGION 1..420: note = ENSP00000387930
MWWRDLTRLRLWLKREAIPGEGRKAAKVNAGVGEKGIYTASSRGGPPSARSKAVTVVAEGAASRSWLSMDAPELGPGLVERLEQLATCPLCGGSFEDPVLLACEHSFCRACLARRWGTPPATGTEASPTACPCCGLPCPRRSLRSNVRLAVEVRISRELREKLAEPGARAGRRRGGRIPTMGCLDLPGEDMRKTWRRFEVPTSKSSNSEDDLPEDYPVVKKMLHRLTADLTLDPGTAHRRLLISADRRSVQLAPPGTPAPPDGPKRFDQLPAVLGAQGFGAGRHCWEVETADAASCRDSSGEDADDEESHYAVGAAGESVQRKGCVRLCPAGAVWAVGGRGGRLWALTAPEPTLLGGVEPPPRRIRVDLDWERGRVAFYDGRSLDLLYAFQAPGPLGERIFPLFCTCDPRAPLRIVPAES

SEQ ID NO: 34963 - protein, 783 aa, Homo sapiens
  REGION 1..783: note = ENSP00000385328
MSGGHQLQLAALWPWLLMATLQAGFGRTGLVLAAAVESERSAEQKAIIRVIPLKMDPTGKLNLTLEGVFAGVAEITPAEGKLMQSHPLYLCNASDDDNLEPGFISIVKLESPRRAPRPCLSLASKARMAGERGASAVLFDITEDRAAAEQLQQPLGLTWPVVLIWGNDAEKLMEFVYKNQKAHVRIELKEPPAWPDYDVWILMTVVGTIFVIILASVLRIRCRPRHSRPDPLQQRTAWAISQLATRRYQASCRQARGEWPDSGSSCSSAPVCAICLEEFSEGQELRVISCLHEFHRNCVDPWLHQHRTCPLCMFNITEGDSFSQSLGPSRSYQEPGRRLHLIRQHPGHAHYHLPAAYLLGPSRSAVARPPRPGPFLPSQEPGMGPRHHRFPRAAHPRAPGEQQRLAGAQHPYAQGWGLSHLQSTSQHPAACPVPLRRARPPDSSGSGESYCTERSGYLADGPASDSSSGPCHGSSSDSVVNCTDISLQGVHGSSSTFCSSLSSDFDPLVYCSPKGDPQRVDMQPSVTSRPRSLDSVVPTGETQVSSHVHYHRHRHHHYKKRFQWHGRKPGPETGVPQSRPPIPRTQPQPEPPSPDQQVTRSNSAAPSGRLSNPQCPRALPEPAPGPVDASSICPSTSSLFNLQKSSLSARHPQRKRRGGPSEPTPGSRPQDATVHPACQIFPHYTPSVAYPWSPEAHPLICGPPGLDKRLLPETPGPCYSNSQPVWLCLTPRQPLEPHPPGEGPSEWSSDTAEGRPCPYPHCQVLSAQPGSEEELEELCEQAV

SEQ ID NO: 34964 - protein, 742 aa, Homo sapiens
  REGION 1..742: note = ENSP00000462502
MSGGHQLQLAALWPWLLMATLQAGFGRTGLVLAAAVESERSAEQKAIIRVIPLKMDPTGKLNLTLEGVFAGVAEITPAEGKLMQARMAGERGASAVLFDITEDRAAAEQLQQPLGLTWPVVLIWGNDAEKLMEFVYKNQKAHVRIELKEPPAWPDYDVWILMTVVGTIFVIILASVLRIRCRPRHSRPDPLQQRTAWAISQLATRRYQASCRQARGEWPDSGSSCSSAPVCAICLEEFSEGQELRVISCLHEFHRNCVDPWLHQHRTCPLCMFNITEGDSFSQSLGPSRSYQEPGRRLHLIRQHPGHAHYHLPAAYLLGPSRSAVARPPRPGPFLPSQEPGMGPRHHRFPRAAHPRAPGEQQRLAGAQHPYAQGWGLSHLQSTSQHPAACPVPLRRARPPDSSGSGESYCTERSGYLADGPASDSSSGPCHGSSSDSVVNCTDISLQGVHGSSSTFCSSLSSDFDPLVYCSPKGDPQRVDMQPSVTSRPRSLDSVVPTGETQVSSHVHYHRHRHHHYKKRFQWHGRKPGPETGVPQSRPPIPRTQPQPEPPSPDQQVTRSNSAAPSGRLSNPQCPRALPEPAPGPVDASSICPSTSSLFNLQKSSLSARHPQRKRRGGPSEPTPGSRPQDATVHPACQIFPHYTPSVAYPWSPEAHPLICGPPGLDKRLLPETPGPCYSNSQPVWLCLTPRQPLEPHPPGEGPSEWSSDTAEGRPCPYPHCQVLSAQPGSEEELEELCEQAV

SEQ ID NO: 34965 - protein, 783 aa, Homo sapiens; identical to SEQ ID NO: 34963
  REGION 1..783: note = ENSP00000463069

SEQ ID NO: 34966 - protein, 783 aa, Homo sapiens; identical to SEQ ID NO: 34963
  REGION 1..783: note = ENSP00000462764

SEQ ID NO: 34967 - protein, 656 aa, Homo sapiens
  REGION 1..656: note = ENSP00000463716
MAGERGASAVLFDITEDRAAAEQLQQPLGLTWPVVLIWGNDAEKLMEFVYKNQKAHVRIELKEPPAWPDYDVWILMTVVGTIFVIILASVLRIRCRPRHSRPDPLQQRTAWAISQLATRRYQASCRQARGEWPDSGSSCSSAPVCAICLEEFSEGQELRVISCLHEFHRNCVDPWLHQHRTCPLCMFNITEGDSFSQSLGPSRSYQEPGRRLHLIRQHPGHAHYHLPAAYLLGPSRSAVARPPRPGPFLPSQEPGMGPRHHRFPRAAHPRAPGEQQRLAGAQHPYAQGWGLSHLQSTSQHPAACPVPLRRARPPDSSGSGESYCTERSGYLADGPASDSSSGPCHGSSSDSVVNCTDISLQGVHGSSSTFCSSLSSDFDPLVYCSPKGDPQRVDMQPSVTSRPRSLDSVVPTGETQVSSHVHYHRHRHHHYKKRFQWHGRKPGPETGVPQSRPPIPRTQPQPEPPSPDQQVTRSNSAAPSGRLSNPQCPRALPEPAPGPVDASSICPSTSSLFNLQKSSLSARHPQRKRRGGPSEPTPGSRPQDATVHPACQIFPHYTPSVAYPWSPEAHPLICGPPGLDKRLLPETPGPCYSNSQPVWLCLTPRQPLEPHPPGEGPSEWSSDTAEGRPCPYPHCQVLSAQPGSEEELEELCEQAV

SEQ ID NO: 34968 - protein, 742 aa, Homo sapiens
  REGION 1..742: note = ENSP00000462447
MAGERGASAVLFDITEDRAAAEQLQQPLGLTWPVVLIWGNDAEKLMEFVYKNQKAHVRIELKEPPAWPDYDVWILMTVVGTIFVIILASVLRIRCRPRHSRPDPLQQRTAWAISQLATRRYQASCRQARGEWPDSGSSCSSAPVCAICLEEFSEGQELRVISCLHEFHRNCVDPWLHQHRTCPLCMFNITEGDSFSQSLGPSRSYQEPGRRLHLIRQHPGHAHYHLPAAYLLGPSRSAVARPPRPGPFLPSQEPGMGPRHHRFPRAAHPRAPGEQQRLAGAQHPYAQGWGLSHLQSTSQHPAACPVPLRRARPPDSSGSGESYCTERSGYLADGPASDSSSGPCHGSSSDSVVNCTDISLQGVHGSSSTFCSSLSSDFDPLVYCSPKGDPQRVDMQPSVTSRPRSLDSVVPTGETQVSSHVHYHRHRHHHYKKRFQWHGRKPGPETGVPQSRPPIPRTQPQPEPPSPDQQVTRSNSAAPSGRLSNPQCPRALPEPAPGPVDASSICPSTSSLFNLQKSSLSARHPQRKRRGGPSEPTPGSRPQDATVHPACQIFPHYTPSVAYPWSPEAHPLICGPPGLDKRLLPETPGPCYSNSQPVWLCLTPRQPLEPHPPGEGPSEWSSDTAEGRPCPYPHCQVLSAQPGEFSEGSGCGRERRLQLNISGQVKSANKGLMEAEKDTAEMTTKILNHRDSVSCWLECRNTPPLPGATPLVGRSQGGPREVLVWLRHQKGTWKAGCDGSCL

SEQ ID NO: 34969 - protein, 1394 aa, Homo sapiens
  REGION 1..1394: note = ENSP00000417335
MARRHERVTRRMWTWAPGLLMMTVVFWGHQGNGQGQGSRLRQEDFPPRIVEHPSDVIVSKGEPTTLNCKAEGRPTPTIEWYKDGERVETDKDDPRSHRMLLPSGSLFFLRIVHGRRSKPDEGSYVCVARNYLGEAVSRNASLEVALLRDDFRQNPTDVVVAAGEPAILECQPPRGHPEPTIYWKKDKVRIDDKEERISIRGGKLMISNTRKSDAGMYTCVGTNMVGERDSDPAELTVFERPTFLRRPINQVVLEEEAVEFRCQVQGDPQPTVRWKKDDADLPRGRYDIKDDYTLRIKKTMSTDEGTYMCIAENRVGKMEASATLTVRAPPQFVVRPRDQIVAQGRTVTFPCETKGNPQPAVFWQKEGSQNLLFPNQPQQPNSRCSVSPTGDLTITNIQRSDAGYYICQALTVAGSILAKAQLEVTDVLTDRPPPIILQGPANQTLAVDGTALLKCKATGDPLPVISWLKEGFTFPGRDPRATIQEQGTLQIKNLRISDTGTYTCVATSSSGETSWSAVLDVTESGATISKNYDLSDLPGPPSKPQVTDVTKNSVTLSWQPGTPGTLPASAYIIEAFSQSVSNSWQTVANHVKTTLYTVRGLRPNTIYLFMVRAINPQGLSDPSPMSDPVRTQDISPPAQGVDHRQVQKELGDVLVRLHNPVVLTPTTVQVTWTVDRQPQFIQGYRVMYRQTSGLQATSSWQNLDAKVPTERSAVLVNLKKGVTYEIKVRPYFNEFQGMDSESKTVRTTEEAPSAPPQSVTVLTVGSYNSTSISVSWDPPPPDHQNGIIQEYKIWCLGNETRFHINKTVDAAIRSVIIGGLFPGIQYRVEVAASTSAGVGVKSEPQPIIIGRRNEVVITENNNSITEQITDVVKQPAFIAGIGGACWVILMGFSIWLYWRRKKRKGLSNYAVTFQRGDGGLMSNGSRPGLLNAGDPSYPWLADSWPATSLPVNNSNSGPNEIGNFGRGDVLPPVPGQGDKTATMLSDGAIYSSIDFTTKTSYNSSSQITQATPYATTQILHSNSIHELAVDLPDPQWKSSIQQKTDLMGFGYSLPDQNKGNNGGKGGKKKKNKNSSKPQKNNGSTWANVPLPPPPVQPLPGTELEHYAVEQQENGYDSDSWCPPLPVQTYLHQGLEDELEEDDDRVPTPPVRGVASSPAISFGQQSTATLTPSPREEMQPMLQAHLDELTRAYQFDIAKQTWHIQSNNQPPQPPVPPLGYVSGALISDLETDVADDDADDEEEALEIPRPLRALDQTPGSSMDNLDSSVTGKAFTSSQRPRPTSPFSTDSNTSAALSQSQRPRPTKKHKGGRMDQQPALPHRREGMTDEEALVPYSKPSFPSPGGHSSSGTASSKGSTGPRKTEVLRAGHQRNASDLLDIGYMGSNSQGQFTGEL

SEQ ID NO: 34970 - protein, 1070 aa, Homo sapiens
  REGION 1..1070: note = ENSP00000473268
MARRHERVTRRMWTWAPGLLMMTVVFWGHQGNGQGQGSRLRQEDFPPRIVEHPSDVIVSKGEPTTLNCKAEGRPTPTIEWYKDGERVETDKDDPRSHRMLLPSGSLFFLRIVHGRRSKPDEGSYVCVARNYLGEAVSRNASLEVALLRDDFRQNPTDVVVAAGEPAILECQPPRGHPEPTIYWKKDKVRIDDKEERISIRGGKLMISNTRKSDAGMYTCVGTNMVGERDSDPAELTVFERPTFLRRPINQVVLEEEAVEFRCQVQGDPQPTVRWKKDDADLPRGRYDIKDDYTLRIKKTMSTDEGTYMCIAENRVGKMEASATLTVRARPVAPPQFVVRPRDQIVAQGRTVTFPCETKGNPQPAVFWQKEGSQNLLFPNQPQQPNSRCSVSPTGDLTITNIQRSDAGYYICQALTVAGSILAKAQLEVTDVLTDRPPPIILQGPANQTLAVDGTALLKCKATGDPLPVISWLKEGFTFPGRDPRATIQEQGTLQIKNLRISDTGTYTCVATSSSGETSWSAVLDVTESGATISKNYDLSDLPGPPSKPQVTDVTKNSVTLSWQPGTPGTLPASAYIIEAFSQSVSNSWQTVANHVKTTLYTVRGLRPNTIYLFMVRAINPQGLSDPSPMSDPVRTQDISPPAQGVDHRQVQKELGDVLVRLHNPVVLTPTTVQVTWTVDRQPQFIQGYRVMYRQTSGLQATSSWQNLDAKVPTERSAVLVNLKKGVTYEIKVRPYFNEFQGMDSESKTVRTTEEAPSAPPQSVTVLTVGSYNSTSISVSWDPPPPDHQNGIIQEYKIWCLGNETRFHINKTVDAAIRSVIIGGLFPGIQYRVEVAASTSAGVGVKSEPQPIIIGRRNEVVITENNNSITEQITDVVKQPAFIAGIGGACWVILMGFSIWLYWRRKKRKGLSNYAVTFQRGDGGLMSNGSRPGLLNAGDPSYPWLADSWPATSLPVNNSNSGPNEIGNFGRGDVLPPVPGQGDKTATMLSDGAIYSSIDFTTKTSYNSSSQITQATPYATTQILHSNSIHELAVDLPDPQWKSSIQQKTDLMGFGYSLPDQNKGNNGGKGG

SEQ ID NO: 34971 - protein, 1378 aa, Homo sapiens
  REGION 1..1378: note = ENSP00000417164
MSLLMFTQLLLCGFLYVRVDGSRLRQEDFPPRIVEHPSDVIVSKGEPTTLNCKAEGRPTPTIEWYKDGERVETDKDDPRSHRMLLPSGSLFFLRIVHGRRSKPDEGSYVCVARNYLGEAVSRNASLEVALLRDDFRQNPTDVVVAAGEPAILECQPPRGHPEPTIYWKKDKVRIDDKEERISIRGGKLMISNTRKSDAGMYTCVGTNMVGERDSDPAELTVFERPTFLRRPINQVVLEEEAVEFRCQVQGDPQPTVRWKKDDADLPRGRYDIKDDYTLRIKKTMSTDEGTYMCIAENRVGKMEASATLTVRAPPQFVVRPRDQIVAQGRTVTFPCETKGNPQPAVFWQKEGSQNLLFPNQPQQPNSRCSVSPTGDLTITNIQRSDAGYYICQALTVAGSILAKAQLEVTDVLTDRPPPIILQGPANQTLAVDGTALLKCKATGDPLPVISWLKEGFTFPGRDPRATIQEQGTLQIKNLRISDTGTYTCVATSSSGETSWSAVLDVTESGATISKNYDLSDLPGPPSKPQVTDVTKNSVTLSWQPGTPGTLPASAYIIEAFSQSVSNSWQTVANHVKTTLYTVRGLRPNTIYLFMVRAINPQGLSDPSPMSDPVRTQDISPPAQGVDHRQVQKELGDVLVRLHNPVVLTPTTVQVTWTVDRQPQFIQGYRVMYRQTSGLQATSSWQNLDAKVPTERSAVLVNLKKGVTYEIKVRPYFNEFQGMDSESKTVRTTEEAPSAPPQSVTVLTVGSYNSTSISVSWDPPPPDHQNGIIQEYKIWCLGNETRFHINKTVDAAIRSVIIGGLFPGIQYRVEVAASTSAGVGVKSEPQPIIIGRRNEVVITENNNSITEQITDVVKQPAFIAGIGGACWVILMGFSIWLYWRRKKRKGLSNYAVTFQRGDGGLMSNGSRPGLLNAGDPSYPWLADSWPATSLPVNNSNSGPNEIGNFGRGDVLPPVPGQGDKTATMLSDGAIYSSIDFTTKTSYNSSSQITQATPYATTQILHSNSIHELAVDLPDPQWKSSIQQKTDLMGFGYSLPDQNKGNNGGKGGKKKKNKNSSKPQKNNGSTWANVPLPPPPVQPLPGTELEHYAVEQQENGYDSDSWCPPLPVQTYLHQGLEDELEEDDDRVPTPPVRGVASSPAISFGQQSTATLTPSPREEMQPMLQAHLDELTRAYQFDIAKQTWHIQSNNQPPQPPVPPLGYVSGALISDLETDVADDDADDEEEALEIPRPLRALDQTPGSSMDNLDSSVTGKAFTSSQRPRPTSPFSTDSNTSAALSQSQRPRPTKKHKGGRMDQQPALPHRREGMTDEEALVPYSKPSFPSPGGHSSSGTASSKGSTGPRKTEVLRAGHQRNASDLLDIGYMGSNSQGQFTGEL

SEQ ID NO: 34972 - protein, 1439 aa, Homo sapiens
  REGION 1..1439: note = ENSP00000327536
MSLLMFTQLLLCGFLYVRVDGSRLRQEDFPPRIVEHPSDVIVSKGEPTTLNCKAEGRPTPTIEWYKDGERVETDKDDPRSHRMLLPSGSLFFLRIVHGRRSKPDEGSYVCVARNYLGEAVSRNASLEVALLRDDFRQNPTDVVVAAGEPAILECQPPRGHPEPTIYWKKDKVRIDDKEERISIRGGKLMISNTRKSDAGMYTCVGTNMVGERDSDPAELTVFERPTFLRRPINQVVLEEEAVEFRCQVQGDPQPTVRWKKDDADLPRGRYDIKDDYTLRIKKTMSTDEGTYMCIAENRVGKMEASATLTVRAPPQFVVRPRDQIVAQGRTVTFPCETKGNPQPAVFWQKEGSQNLLFPNQPQQPNSRCSVSPTGDLTITNIQRSDAGYYICQALTVAGSILAKAQLEVTDVLTDRPPPIILQGPANQTLAVDGTALLKCKATGDPLPVISWLKEGFTFPGRDPRATIQEQGTLQIKNLRISDTGTYTCVATSSSGETSWSAVLDVTESGATISKNYDLSDLPGPPSKPQVTDVTKNSVTLSWQPGTPGTLPASAYIIEAFSQSVSNSWQTVANHVKTTLYTVRGLRPNTIYLFMVRAINPQGLSDPSPMSDPVRTQDISPPAQGVDHRQVQKELGDVLVRLHNPVVLTPTTVQVTWTVDRQPQFIQGYRVMYRQTSGLQATSSWQNLDAKVPTERSAVLVNLKKGVTYEIKVRPYFNEFQGMDSESKTVRTTEEAPSAPPQSVTVLTVGSYNSTSISVSWDPPPPDHQNGIIQEYKIWCLGNETRFHINKTVDAAIRSVIIGGLFPGIQYRVEVAASTSAGVGVKSEPQPIIIGRRNEVVITENNNSITEQITDVVKQPAFIAGIGGACWVILMGFSIWLYWRRKKRKGLSNYAVTFQRGDGGLMSNGSRPGLLNAGDPSYPWLADSWPATSLPVNNSNSGPNEIGNFGRGDVLPPVPGQGDKTATMLSDGAIYSSIDFTTKTSYNSSSQITQATPYATTQILHSNSIHELAVDLPDPQWKSSIQQKTDLMGFGYSLPDQNKGNNGGKGGKKKKNKNSSKPQKNNGSTWANVPLPPPPVQPLPGTELEHYAVEQQENGYDSDSWCPPLPVQTYLHQGLEDELEEDDDRVPTPPVRGVASSPAISFGQQSTATLTPSPREEMQPMLQAHLDELTRAYQFDIAKQTWHIQSNNQPPQPPVPPLGYVSGALISDLETDVADDDADDEEEALEIPRPLRALDQTPGSSMDNLDSSVTGSMVNGWGSASDEDRNFSSHRSSVGSSSDGSIFASGSFAQALVAAADKAGFRLDGTSLTRTGKAFTSSQRPRPTSPFSTDSNTSAALSQSQRPRPTKKHKGGRMDQQPALPHRREGMTDEEALVPYSKPSFPSPGGHSSSGTASSKGSTGPRKTEVLRAGHQRNASDLLDIGYMGSNSQGQFTGEL

SEQ ID NO: 34973 - protein, 564 aa, Homo sapiens
  REGION 1..564: note = ENSP00000418117
MSLLMFTQLLLCGFLYVRVDGSRLRQEDFPPRIVEHPSDVIVSKGEPTTLNCKAEGRPTPTIEWYKDGERVETDKDDPRSHRMLLPSGSLFFLRIVHGRRSKPDEGSYVCVARNYLGEAVSRNASLEVALLRDDFRQNPTDVVVAAGEPAILECQPPRGHPEPTIYWKKDKVRIDDKEERISIRGGKLMISNTRKSDAGMYTCVGTNMVGERDSDPAELTVFERPTFLRRPINQVVLEEEAVEFRCQVQGDPQPTVRWKKDDADLPRGRYDIKDDYTLRIKKTMSTDEGTYMCIAENRVGKMEASATLTVRAPPQFVVRPRDQIVAQGRTVTFPCETKGNPQPAVFWQKEGSQNLLFPNQPQQPNSRCSVSPTGDLTITNIQRSDAGYYICQALTVAGSILAKAQLEVTDVLTDRPPPIILQGPANQTLAVDGTALLKCKATGDPLPVISWLKEGFTFPGRDPRATIQEQGTLQIKNLRISDTGTYTCVATSSSGETSWSAVLDVTESGATISKNYDLSDLPGPPSKPQVTDVTKNSVTLSWQPGTPGTLPASAYIIEAFRYVV

SEQ ID NO: 34974 - protein, 342 aa, Homo sapiens
  REGION 1..342: note = ENSP00000418344
  VARIANT 1: note = Any amino acid
XNNSITEQITDVVKQPAFIAGIGGACWVILMGFSIWLYWRRKKRKGLSNYAVTFQRGDGGLMSNGSRPGLLNAGDPSYPWLADSWPATSLPVNNSNSGPNEIGNFGRGDVLPPVPGQGDKTATMLSDGAIYSSIDFTTKTSYNSSSQITQATPYATTQILHSNSIHELAVDLPDPQWKSSIQQKTDLMGFGYSLPDQNKGNNGGKGGKKKKNKNSSKPQKNNGSTWANVPLPPPPVQPLPGTELEHYAVEQQENGYDSDSWCPPLPVQTYLHQGLEDELEEDDDRVPTPPVRGVASSPAISFGQQSTATLTPSPREEMQPMLQAHLDELTRAYQFDIAKQTW

SEQ ID NO: 34975 - protein, 214 aa, Homo sapiens
  REGION 1..214: note = ENSP00000418190
  VARIANT 1: note = Any amino acid
XSWPATSLPVNNSNSGPNEIGNFGRGDVLPPVPGQGDKTATMLSDGAIYSSIDFTTKTSYNSSSQITQATPYATTQILHSNSIHELAVDLPDPQWKSSIQQKTDLMGFGYSLPDQNKGNNALLYIPDYRLAEGLSNRMPHNQSQDFSTTSSHNSSERSGSLSGGKGGKKKKNKNSSKPQKNNGSTWANVPLPPPPVQPLPGTELEHYAVEQQEN

SEQ ID NO: 34976 - protein, 208 aa, Homo sapiens
  REGION 1..208: note = ENSP00000418446
  VARIANT 1: note = Any amino acid
XDELTRAYQFDIAKQTWHIQSNNQPPQPPVPPLGYVSGALISDLETDVADDDADDEEEALEIPRPLRALDQTPGSSMDNLDSSVTGKAFTSSQRPRPTSPFSTDSNTSAALSQSQRPRPTKKHKGGRMDQQPALPHRREGMTDEEALVPYSKPSFPSPGGHSSSGTASSKGSTGPRKTEVLRAGHQRNASDLLDIGYMGSNSQGQFTE

SEQ ID NO: 34977 - protein, 198 aa, Homo sapiens
  REGION 1..198: note = ENSP00000417471
  VARIANT 1: note = Any amino acid
XSNTSAALSQSQRPRPTKKHKGGRMDQQPALPHRREGMTDDLPPPPDPPPGQGLRQQIGPSQQAGNVENSAERKGSSLERQHASSLEDTKSSLDCPARTSLEWQRQTQEWISSTERQEDIRKAPHKQGVGSEEALVPYSKPSFPSPGGHSSSGTASSKGSTGPRKTEVLRAGHQRNASDLLDIGYMGSNSQGQFTGEL

SEQ ID NO: 34978 - protein, 1250 aa, Homo sapiens [sequence omitted]

SEQ ID NO: 34979 - protein, 1386 aa, Homo sapiens
  REGION 1..1386: note = ENSP00000380903
MLRYLLKTLLQMNLFADSLAGDISNSSELLLGFNSSLAALNHTLLPPGDPSLNGSRVGPEDAMPRIVEQPPDLLVSRGEPATLPCRAEGRPRPNIEWYKNGARVATVREDPRAHRLLLPSGALFFPRIVHGRRARPDEGVYTCVARNYLGAAASRNASLEVAVLRDDFRQSPGNVVVAVGEPAVLECVPPRGHPEPSVSWRKDGARLKEEEGRITIRGGKLMMSHTLKSDAGMYVCVASNMAGERESAAAEVMVLERPSFLRRPVNQVVLADAPVTFLCEVKGDPPPRLRWRKEDGELPTGRYEIRSDHSLWIGHVSAEDEGTYTCVAENSVGRAEASGSLSVHVPPQLVTQPQDQMAAPGESVAFQCETKGNPPPAIFWQKEGSQVLLFPSQSLQPTGRFSVSPRGQLNITAVQRGDAGYYVCQAVSVAGSILAKALLEIKGASLDGLPPVILQGPANQTLVLGSSVWLPCRVTGNPQPSVRWKKDGQWLQGDDLQFKTMANGTLYIANVQEMDMGFYSCVAKSSTGEATWSGWLKMREDWGVSPDPPTEPSSPPGAPSQPVVTEITKNSITLTWKPNPQTGAAVTSYVIEAFSPAAGNTWRTVADGVQLETHTVSGLQPNTIYLFLVRAVGAWGLSEPSPVSEPVRTQDSSPSRPVEDPWRGQQGLAEVAVRLQEPIVLGPRTLQVSWTVDGPVQLVQGFRVSWRVAGPEGGSWTMLDLQSPSQQSTVLRGLPPGTQIQIKVQAQGQEGLGAESLSVTRSIPEEAPSGPPQGVAVALGGDGNSSITVSWEPPLPSQQNGVITEYQIWCLGNESRFHLNRSAAGWARSAMLRGLVPGLLYRTLVAAATSAGVGVPSAPVLVQLPSPPDLEPGLEVGAGLAVRLARVLREPAFLAGSGAACGALLLGLCAALYWRRKQRKELSHYTASFAYTPAVSFPHSEGLSGASSRPPMGLGPAPYSWLADSWPHPSRSPSAQEPRGSCCPSNPDPDDRYYNEAGISLYLAQTARGTAAPGEGPVYSTIDPAGEELQTFHGGFPQHPSGDLGPWSQYAPPEWSQGDSGAKGGKVKLLGKPVQMPSLNWPEALPPPPPSCELSCLEGPEEELEGSSEPEEWCPPMPERSHLTEPSSSGGCLVTPSRRETPSPTPSYGQQSTATLTPSPPDPPQPPTDMPHLHQMPRRVPLGPSSPLSVSQPMLGIREARPAGLGAGPAASPHLSPSPAPSTASSAPGRTWQGNGEMTPPLQGPRARFRKKPKALPYRRENSPGDLPPPPLPPPEEEASWALELRAAGSMSSLERERSGERKAVQAVPLAAQRVLHPDEEAWLPYSRPSFLSRGQGTSTCSTAGSNSSRGSSSSRGSRGPGRSRSRSQSRSQSQRPGQKRREEPR

SEQ ID NO: 34980 - protein, 1364 aa, Homo sapiens
  REGION 1..1364: note = ENSP00000441797
MERPEDSLSLWSLNLSPQFPCLNALRHPLSPGSRVGPEDAMPRIVEQPPDLLVSRGEPATLPCRAEGRPRPNIEWYKNGARVATVREDPRAHRLLLPSGALFFPRIVHGRRARPDEGVYTCVARNYLGAAASRNASLEVAVLRDDFRQSPGNVVVAVGEPAVLECVPPRGHPEPSVSWRKDGARLKEEEGRITIRGGKLMMSHTLKSDAGMYVCVASNMAGERESAAAEVMVLERPSFLRRPVNQVVLADAPVTFLCEVKGDPPPRLRWRKEDGELPTGRYEIRSDHSLWIGHVSAEDEGTYTCVAENSVGRAEASGSLSVHVPPQLVTQPQDQMAAPGESVAFQCETKGNPPPAIFWQKEGSQVLLFPSQSLQPTGRFSVSPRGQLNITAVQRGDAGYYVCQAVSVAGSILAKALLEIKGASLDGLPPVILQGPANQTLVLGSSVWLPCRVTGNPQPSVRWKKDGQWLQGDDLQFKTMANGTLYIANVQEMDMGFYSCVAKSSTGEATWSGWLKMREDWGVSPDPPTEPSSPPGAPSQPVVTEITKNSITLTWKPNPQTGAAVTSYVIEAFSPAAGNTWRTVADGVQLETHTVSGLQPNTIYLFLVRAVGAWGLSEPSPVSEPVRTQDSSPSRPVEDPWRGQQGLAEVAVRLQEPIVLGPRTLQVSWTVDGPVQLVQGFRVSWRVAGPEGGSWTMLDLQSPSQQSTVLRGLPPGTQIQIKVQAQGQEGLGAESLSVTRSIPEEAPSGPPQGVAVALGGDGNSSITVSWEPPLPSQQNGVITEYQIWCLGNESRFHLNRSAAGWARSAMLRGLVPGLLYRTLVAAATSAGVGVPSAPVLVQLPSPPDLEPGLEVGAGLAVRLARVLREPAFLAGSGAACGALLLGLCAALYWRRKQRKELSHYTASFAYTPAVSFPHSEGLSGASSRPPMGLGPAPYSWLADSWPHPSRSPSAQEPRGSCCPSNPDPDDRYYNEAGISLYLAQTARGTAAPGEGPVYSTIDPAGEELQTFHGGFPQHPSGDLGPWSQYAPPEWSQGDSGAKGGKVKLLGKPVQMPSLNWPEALPPPPPSCELSCLEGPEEELEGSSEPEEWCPPMPERSHLTEPSSSGGCLVTPSRRETPSPTPSYGQQSTATLTPSPPDPPQPPTDMPHLHQMPRRVPLGPSSPLSVSQPMLGIREARPAGLGAGPAASPHLSPSPAPSTASSAPGRTWQGNGEMTPPLQGPRARFRKKPKALPYRRENSPGDLPPPPLPPPEEEASWALELRAAGSMSSLERERSGERKAVQAVPLAAQRVLHPDEEAWLPYSRPSFLSRGQGTSTCSTAGSNSSRGSSSSRGSRGPGRSRSRSQSRSQSQRPGQKRREEPR

SEQ ID NO: 34981 - protein, 149 aa, Homo sapiens
  REGION 1..149: note = ENSP00000438799
MTPPLQGPRARFRKKPKALPYRRENSPGDLPPPPLPPPEEEASWALELRAAGSMSSLERERSGERKAVQAVPLAAQRVLHPDEEAWLPYSRPSFLSRGQGTSTCSTAGSNSSRGSSSSRGSRGPGRSRSRSQSRSQSQRPGQKRREEPR

SEQ ID NO: 34982 - protein, 523 aa, Homo sapiens
  REGION 1..523: note = ENSP00000335087
MESAPAAPDPAASEPGSSGADAAAGSRETPLNQESARKSEPPAPVRRQSYSSTSRGISVTKKTHTSQIEIIPCKICGDKSSGIHYGVITCEGCKGFFRRSQQSNATYSCPRQKNCLIDRTSRNRCQHCRLQKCLAVGMSRDAVKFGRMSKKQRDSLYAEVQKHRMQQQQRDHQQQPGEAEPLTPTYNISANGLTELHDDLSNYIDGHTPEGSKADSAVSSFYLDIQPSPDQSGLDINGIKPEPICDYTPASGFFPYCSFTNGETSPTVSMAELEHLAQNISKSHLETCQYLREELQQITWQTFLQEEIENYQNKQREVMWQLCAIKITEAIQYVVEFAKRIDGFMELCQNDQIVLLKAGSLEVVFIRMCRAFDSQNNTVYFDGKYASPDVFKSLGCEDFISFVFEFGKSLCSMHLTEDEIALFSAFVLMSADRSWLQEKVKIEKLQQKIQLALQHVLQKNHREDGILTKLICKVSTLRALCGRHTEKLMAFKAIYPDIVRLHFPPLYKELFTSEFEPAMQIDG

SEQ ID NO: 34983 - protein, 548 aa, Homo sapiens
  REGION 1..548: note = ENSP00000309753
MNEGAPGDSDLETEARVPWSIMGHCLRTGQARMSATPTPAGEGARSSSTCSSLSRLFWSQLEHINWDGATAKNFINLREFFSFLLPALRKAQIEIIPCKICGDKSSGIHYGVITCEGCKGFFRRSQQSNATYSCPRQKNCLIDRTSRNRCQHCRLQKCLAVGMSRDAVKFGRMSKKQRDSLYAEVQKHRMQQQQRDHQQQPGEAEPLTPTYNISANGLTELHDDLSNYIDGHTPEGSKADSAVSSFYLDIQPSPDQSGLDINGIKPEPICDYTPASGFFPYCSFTNGETSPTVSMAELEHLAQNISKSHLETCQYLREELQQITWQTFLQEEIENYQNKQREVMWQLCAIKITEAIQYVVEFAKRIDGFMELCQNDQIVLLKAGSLEVVFIRMCRAFDSQNNTVYFDGKYASPDVFKSLGCEDFISFVFEFGKSLCSMHLTEDEIALFSAFVLMSADRSWLQEKVKIEKLQQKIQLALQHVLQKNHREDGILTKLICKVSTLRALCGRHTEKLMAFKAIYPDIVRLHFPPLYKELFTSEFEPAMQIDG

SEQ ID NO: 34984 - protein, 556 aa, Homo sapiens
  REGION 1..556: note = ENSP00000261523
MNEGAPGDSDLETEARVPWSIMGHCLRTGQARMSATPTPAGEGARRDELFGILQILHQCILSSGDAFVLTGVCCSWRQNGKPPYSQKEDKEVQTGYMNAQIEIIPCKICGDKSSGIHYGVITCEGCKGFFRRSQQSNATYSCPRQKNCLIDRTSRNRCQHCRLQKCLAVGMSRDAVKFGRMSKKQRDSLYAEVQKHRMQQQQRDHQQQPGEAEPLTPTYNISANGLTELHDDLSNYIDGHTPEGSKADSAVSSFYLDIQPSPDQSGLDINGIKPEPICDYTPASGFFPYCSFTNGETSPTVSMAELEHLAQNISKSHLETCQYLREELQQITWQTFLQEEIENYQNKQREVMWQLCAIKITEAIQYVVEFAKRIDGFMELCQNDQIVLLKAGSLEVVFIRMCRAFDSQNNTVYFDGKYASPDVFKSLGCEDFISFVFEFGKSLCSMHLTEDEIALFSAFVLMSADRSWLQEKVKIEKLQQKIQLALQHVLQKNHREDGILTKLICKVSTLRALCGRHTEKLMAFKAIYPDIVRLHFPPLYKELFTSEFEPAMQIDG

SEQ ID NO: 34985 - protein, 468 aa, Homo sapiens
  REGION 1..468: note = ENSP00000402971
MMYFVIAAMKAQIEIIPCKICGDKSSGIHYGVITCEGCKGFFRRSQQSNATYSCPRQKNCLIDRTSRNRCQHCRLQKCLAVGMSRDAVKFGRMSKKQRDSLYAEVQKHRMQQQQRDHQQQPGEAEPLTPTYNISANGLTELHDDLSNYIDGHTPEGSKADSAVSSFYLDIQPSPDQSGLDINGIKPEPICDYTPASGFFPYCSFTNGETSPTVSMAELEHLAQNISKSHLETCQYLREELQQITWQTFLQEEIENYQNKQREVMWQLCAIKITEAIQYVVEFAKRIDGFMELCQNDQIVLLKAGSLEVVFIRMCRAFDSQNNTVYFDGKYASPDVFKSLGCEDFISFVFEFGKSLCSMHLTEDEIALFSAFVLMSADRSWLQEKVKIEKLQQKIQLALQHVLQKNHREDGILTKLICKVSTLRALCGRHTEKLMAFKAIYPDIVRLHFPPLYKELFTSEFEPAMQIDG

SEQ ID NO: 34986 - protein, 62 aa, Homo sapiens
  REGION 1..62: note = ENSP00000449482
  VARIANT 1: note = Any amino acid
XPLNQESARKSEPPAPVRRQSYSSTSRGISVTKKTHTWQAWYRALPCTALPMSSSLARRDPL

SEQ ID NO: 34987 - protein, 153 aa, Homo sapiens
  REGION 1..153: note = ENSP00000453322
MRVTVAPQTKPVFSTNELAHLSPPSAPASQRESGVGLRASCPTEWGQKVVRGAFRGALRAEKRPAATAQIEIIPCKICGDKSSGIHYGVITCEGCKGFFRRSQQSNATYSCPRQKNCLIDRTSRNRCQHCRLQKCLAVGMSRDAVKFGRMSKK

SEQ ID NO: 34988 - protein, 38 aa, Homo sapiens
  REGION 1..38: note = ENSP00000484955
AAAGSRETPLNQESARKSEPPAPVRRQSYSSTSRDWHA

SEQ ID NO: 34989 - protein, 124 aa, Homo sapiens
  REGION 1..124: note = ENSP00000461733
MQKGDTNIKPILQVINIRPITTGNSPPRYRLLMSDGLNTLSSFMLATQLNPLVEEEQLSSNCVCQIHRFIVNTLKDGRRVVILMELEVLKSAEAVGVKIGNPVPYNEGLGQPQVAPPAPAASPA

SEQ ID NO: 34990 - protein, 153 aa, Homo sapiens
  REGION 1..153: note = ENSP00000459788
MQKGDTNIKPILQVINIRPITTGNSPPRYRLLMSDGLNTLSSFMLATQLNPLVEEEQLSSNCVCQIHRFIVNTLKDGRRVVILMELEVLKSAEAVGVKIGNPVPYNEGLGQPQVAPPAPAASPAASSRPQPQNGSSGMGSTVSKAYGASKTFG

SEQ ID NO: 34991 - protein, 616 aa, Homo sapiens
  REGION 1..616: note = ENSP00000254719
MVGQLSEGAIAAIMQKGDTNIKPILQVINIRPITTGNSPPRYRLLMSDGLNTLSSFMLATQLNPLVEEEQLSSNCVCQIHRFIVNTLKDGRRVVILMELEVLKSAEAVGVKIGNPVPYNEGLGQPQVAPPAPAASPAASSRPQPQNGSSGMGSTVSKAYGASKTFGKAAGPSLSHTSGGTQSKVVPIASLTPYQSKWTICARVTNKSQIRTWSNSRGEGKLFSLELVDESGEIRATAFNEQVDKFFPLIEVNKVYYFSKGTLKIANKQFTAVKNDYEMTFNNETSVMPCEDDHHLPTVQFDFTGIDDLENKSKDSLVDIIGICKSYEDATKITVRSNNREVAKRNIYLMDTSGKVVTATLWGEDADKFDGSRQPVLAIKGARVSDFGGRSLSVLSSSTIIANPDIPEAYKLRGWFDAEGQALDGVSISDLKSGGVGGSNTNWKTLYEVKSENLGQGDKPDYFSSVATVVYLRKENCMYQACPTQDCNKKVIDQQNGLYRCEKCDTEFPNFKYRMILSVNIADFQENQWVTCFQESAEAILGQNAAYLGELKDKNEQAFEEVFQNANFRSFIFRVRVKVETYNDESRIKATVMDVKPVDYREYGRRLVMSIRRSALM

SEQ ID NO: 34992 - protein, 313 aa, Homo sapiens
  REGION 1..313: note = ENSP00000461466
FFPLIEVNKVYYFSKGTLKIANKQFTAVKNDYEMTFNNETSVMPCEDDHHLPTVQFDFTGIDDLENKSKDSLVDIIGICKSYEDATKITVRSNNREVAKRNIYLMDTSGKVVTATLWGEDADKFDGSRQPVLAIKGARVSDFGGRSLSVLSSSTIIANPDIPEAYKLRGWFDAEGQALDGVSISDLKSGGVGGSNTNWKTLYEVKSENLGQGDKVNIADFQENQWVTCFQESAEAILGQNAAYLGELKDKNEQAFEEVFQNANFRSFIFRVRVKVETYNDESRIKATVMDVKPVDYREYGRRLVMSIRRSALM

SEQ ID NO: 34993 - protein, 39 aa, Homo sapiens
  REGION 1..39: note = ENSP00000446789
MTDTVFSNSSNRWMYPSDRPLQSNDKEQLQAGWSVHPGG

SEQ ID NO: 34994 - protein, 104 aa, Homo sapiens
  REGION 1..104: note = ENSP00000446570
MTDTVFSNSSNRWMYPSDRPLQSNDKEQLQAGWSVHPGGQPDRQRKQEELTDEEKEIINRVIARAEKMEEMEQERIGRLVDRLENMRKNVAGDGVNRCILCGEQ

SEQ ID NO: 34995 - protein, 94 aa, Homo sapiens
  REGION 1..94: note = ENSP00000449705
MTDTVFSNSSNRWMYPSDRPLQSNDKEQLQAGWSVHPGGQPDRQRKQEELTDEEKEIINRVIARAEKMEEMEQERIGRLVDRLENMRKNVAGDG

SEQ ID NO: 34996 - protein, 694 aa, Homo sapiens
  REGION 1..694: note = ENSP00000440384
MTDTVFSNSSNRWMYPSDRPLQSNDKEQLQAGWSVHPGGQPDRQRKQEELTDEEKEIINRVIARAEKMEEMEQERIGRLVDRLENMRKNVAGDGVNRCILCGEQLGMLGSACVVCEDCKKNVCTKCGVETNNRLHSVWLCKICIEQREVWKRSGAWFFKGFPKQVLPQPMPIKKTKPQQPVSEPAAPEQPAPEPKHPARAPARGDSEDRRGPGQKTGPDPASAPGRGNYGPPVRRASEARMSSSSRDSESWDHSGGAGDSSRSPAGLRRANSVQASRPAPGSVQSPAPPQPGQPGTPGGSRPGPGPAGRFPDQKPEVAPSDPGTTAPPREERTGGVGGYPAVGAREDRMSHPSGPYSQASAAAPQPAAARQPPPPEEEEEEANSYDSDEATTLGALEFSLLYDQDNSSLQCTIIKAKGLKPMDSNGLADPYVKLHLLPGASKSNKLRTKTLRNTRNPIWNETLVYHGITDEDMQRKTLRISVCDEDKFGHNEFIGETRFSLKKLKPNQRKNFNICLERVIPMKRAGTTGSARGMALYEEEQVERVGDIEERGKILVSLMYSTQQGGLIVGIIRCVHLAAMDANGYSDPFVKLWLKPDMGKKAKHKTQIKKKTLNPEFNEEFFYDIKHSDLAKKSLDISVWDYDIGKSNDYIGGCQLGISAKGERLKHWYECLKNKDKKIERWHQLQNENHVSSD

SEQ ID NO: 34997 - protein, 181 aa, Homo sapiens
  REGION 1..181: note = ENSP00000446780
MTDTVFSNSSNRWMYPSDRPLQSNDKEQLQAGWSVHPGGQPDRQRKQEELTDEEKEIINRVIARAEKMEEMEQERIGRLVDRLENMRKNVAGDGVNRCILCGEQLGMLGSACVVCEDCKKNVCTKCGVETNNRLHSVWLCKICIEQREVWKRSGAWFFKGFPKQVLPQPMPIKKTKPQQPV

SEQ ID NO: 34998 - protein, 12 aa, Homo sapiens
  REGION 1..12: note = ENSP00000447639
MTDTVFSNSSNR

SEQ ID NO: 34999 - protein, 94 aa, Homo sapiens; identical to SEQ ID NO: 34995
  REGION 1..94: note = ENSP00000447306

SEQ ID NO: 35000 - protein, 83 aa, Homo sapiens
  REGION 1..83: note = ENSP00000446556
MTDTVFSNSSNRWMYPSDRPLQSNDKEQLQAGWSVHPGGQPDRQRKQEELTDEEKEIINRVIARAEKMEEMEQERIGRLVDRL

SEQ ID NO: 35001 - protein, 127 aa, Homo sapiens
  REGION 1..127: note = ENSP00000450382
MTDTVFSNSSNRWMYPSDRPLQSNDKEQLQAGWSVHPGGQPDRQRKQEELTDEEKEIINRVIARAEKMEEMEQERIGRLVDRLENMRKNVAGDGVNRCILCGEQLGMLGSACVVCEDCKKNVCTKCG

SEQ ID NO: 35002 - protein, 163 aa, Homo sapiens
  REGION 1..163: note = ENSP00000449613
MTDTVFSNSSNRWMYPSDRPLQSNDKEQLQAGWSVHPGGQPDRQRKQEELTDEEKEIINRVIARAEKMEEMEQERIGRLVDRLENMRKNVAGDGVNRCILCGEQLGMLGSACVVCEDCKKNVCTKCGVETNNRLHSVWLCKICIEQREVWKRSGAWFFKGFPK

SEQ ID NO: 35003 - protein, 115 aa, Homo sapiens
  REGION 1..115: note = ENSP00000447505
MTDTVFSNSSNRWMYPSDRPLQSNDKEQLQAGWSVHPGGQPDRQRKQEELTDEEKEIINRVIARAEKMEEMEQERIGRLVDRLENMRKNVAGDGVNRCILCGEQLGMLGSACVVC

SEQ ID NO: 35004 - protein, 120 aa, Homo sapiens
  REGION 1..120: note = ENSP00000449650
MTDTVFSNSSNRWMYPSDRPLQSNDKEQLQAGWSVHPGGQPDRQRKQEELTDEEKEIINRVIARAEKMEEMEQERIGRLVDRLENMRKNVAGDGVNRCILCGEQLGMLGSACVVCEDCKK

SEQ ID NO: 35005 - protein, 694 aa, Homo sapiens; identical to SEQ ID NO: 34996
  REGION 1..694: note = ENSP00000374036

SEQ ID NO: 35006 - protein, 80 aa, Homo sapiens
  REGION 1..80: note = ENSP00000448100
MEEMEQERIGRLVDRLENMRKNVAGDGVNRCILCGEQLGMLGSACVVCEDCKKNVCTKCGVETNNRLHSVWLCKICIEQR

SEQ ID NO: 35007 - protein, 125 aa, Homo sapiens
  REGION 1..125: note = ENSP00000447083
MTDTVFSNSSNRWMYPSDRPLQSNDKEQLQAGWSVHPGGQPDRQRKQEELTDEEKEIINRVIARAEKMEEMEQERIGRLVDRLENMRKNVAGDGVNRCILCGEQLGMLGSACVVCEDCKKNVCTK

SEQ ID NO: 35008 - protein, 690 aa, Homo sapiens
  REGION 1..690: note = ENSP00000448297
MTDTVFSNSSNRWMYPSDRPLQSKLQAGWSVHPGGQPDRQRKQEELTDEEKEIINRVIARAEKMEEMEQERIGRLVDRLENMRKNVAGDGVNRCILCGEQLGMLGSACVVCEDCKKNVCTKCGVETNNRLHSVWLCKICIEQREVWKRSGAWFFKGFPKQVLPQPMPIKKTKPQQPVSEPAAPEQPAPEPKHPARAPARGDSEDRRGPGQKTGPDPASAPGRGNYGPPVRRASEARMSSSSRDSESWDHSGGAGDSSRSPAGLRRANSVQASRPAPGSVQSPAPPQPGQPGTPGGSRPGPGPAGRFPDQKPEVAPSDPGTTAPPREERTGGVGGYPAVGAREDRMSHPSGPYSQASAAAPQPAAARQPPPPEEEEEEANSYDSDEATTLGALEFSLLYDQDNSSLQCTIIKAKGLKPMDSNGLADPYVKLHLLPGASKSNKLRTKTLRNTRNPIWNETLVYHGITDEDMQRKTLRISVCDEDKFGHNEFIGETRFSLKKLKPNQRKNFNICLERVIPMKRAGTTGSARGMALYEEEQVERVGDIEERGKILVSLMYSTQQGGLIVGIIRCVHLAAMDANGYSDPFVKLWLKPDMGKKAKHKTQIKKKTLNPEFNEEFFYDIKHSDLAKKSLDISVWDYDIGKSNDYIGGCQLGISAKGERLKHWYECLKNKDKKIERWHQLQNENHVSSD

SEQ ID NO: 35009 - protein, 694 aa, Homo sapiens; identical to SEQ ID NO: 34996
  REGION 1..694: note = ENSP00000405357

SEQ ID NO: 35010 - protein, 133 aa, Homo sapiens
  REGION 1..133: note = ENSP00000450216
MTDTVFSNSSNRWMYPSDRPLQSNDKEQLQAGWSVHPGGQPDRQRKQEELTDEEKEIINRVIARAEKMEEMEQERIGRLVDRLENMRKNVAGDGVNRCILCGEQLGMLGSACVVCEDCKKNVCTKCGVETNNR

SEQ ID NO: 35011 - protein, 645 aa, Homo sapiens
  REGION 1..645: note = ENSP00000450347
MTDTVFSNSSNRWMYPSDRPLQSNDKEQRLVDRLENMRKNVAGDGVNRCILCGEQLGMLGSACVVCEDCKKNVCTKCGVETNNRLHSVWLCKICIEQREVWKRSGAWFFKGFPKQVLPQPMPIKKTKPQQPVSEPAAPEQPAPEPKHPARAPARGDSEDRRGPGQKTGPDPASAPGRGNYGPPVRRASEARMSSSSRDSESWDHSGGAGDSSRSPAGLRRANSVQASRPAPGSVQSPAPPQPGQPGTPGGSRPGPGPAGRFPDQKPEVAPSDPGTTAPPREERTGGVGGYPAVGAREDRMSHPSGPYSQASAAAPQPAAARQPPPPEEEEEEANSYDSDEATTLGALEFSLLYDQDNSSLQCTIIKAKGLKPMDSNGLADPYVKLHLLPGASKSNKLRTKTLRNTRNPIWNETLVYHGITDEDMQRKTLRISVCDEDKFGHNEFIGETRFSLKKLKPNQRKNFNICLERVIPMKRAGTTGSARGMALYEEEQVERVGDIEERGKILVSLMYSTQQGGLIVGIIRCVHLAAMDANGYSDPFVKLWLKPDMGKKAKHKTQIKKKTLNPEFNEEFFYDIKHSDLAKKSLDISVWDYDIGKSNDYIGGCQLGISAKGERLKHWYECLKNKDKKIERWHQLQNENHVSSD

SEQ ID NO: 35012 - protein, 60 aa, Homo sapiens
  REGION 1..60: note = ENSP00000448662
MTDTVFSNSSNRWMYPSDRPLQSKLQHSRWTLKDWLCFQVSVKSLKPTNCPSSVDGFSFH

SEQ ID NO: 35013 - protein, 214 aa, Homo sapiens
  REGION 1..214: note = ENSP00000358832
MGRRPARCYRYCKNKPYPKSRFCRGVPDAKIRIFDLGRKKAKVDEFPLCGHMVSDEYEQLSSEALEAARICANKYMVKSCGKDGFHIRVRLHPFHVIRINKMLSCAGADRLQTGMRGAFGKPQGTVARVHIGQVIMSIRTKLQNKEHVIEALRRAKFKFPGRQKIHISKKWGFTKFNADEFEDMVAEKRLIPDGCGVKYIPSRGPLDKWRALHS

SEQ ID NO: 35014 - protein, 200 aa, Homo sapiens
  REGION 1..200: note = ENSP00000388600
MGRRPARCYRYCKNKPYPKSRFCRGVPDAKIRIFDLGRKKAKVDEFPLCGHMVSDEYEQLSSEALEAARICANKYMVKSCGKDGFHIRVRLHPFHVIRINKMLSCAGADRLQTGMRGAFGKPQGTVARVHIGQVIMSIRTKLQNKEHVIEALRRAKFKFPGRQKIHISKKWGFTKFNADEFEDMVAEKRLIPDGCGVKYI

SEQ ID NO: 35015 - protein, 214 aa, Homo sapiens; identical to SEQ ID NO: 35013
  REGION 1..214: note = ENSP00000341730

SEQ ID NO: 35016 - protein, 181 aa, Homo sapiens
  REGION 1..181: note = ENSP00000395025
MGRRPARCYRYCKNKPYPKSRFCRGVPDAKIRIFDLGRKKAKVDEFPLCGHMVSDEYEQLSSEALEAARICANKYMVKSCGKDGFHIRVRLHPFHVIRINKMLSCAGADRSTSQRSGASPSSMLMNLKTWWLKSGSSQMAVGSSTSPVVALWTSGGPCTHEGFQCAAPLLILTNKFYFLST

SEQ ID NO: 35017 - protein, 163 aa, Homo sapiens
  REGION 1..163: note = ENSP00000385621
MVSDEYEQLSSEALEAARICANKYMVKSCGKDGFHIRVRLHPFHVIRINKMLSCAGADRLQTGMRGAFGKPQGTVARVHIGQVIMSIRTKLQNKEHVIEALRRAKFKFPGRQKIHISKKWGFTKFNADEFEDMVAEKRLIPDGCGVKYIPSRGPLDKWRALHS

SEQ ID NO: 35018 - protein, 108 aa, Homo sapiens
  REGION 1..108: note = ENSP00000406125
PKSRFCRGVPDAKIRIFDLGRKKAKVDEFPLCGHMVSDEYEQLSSEALEAARICANKYMVKSCGKDGFHIRVRLHPFHVIRINKMLSCAGADRPTLLCQCWETSRNTS

SEQ ID NO: 35019 - protein, 28 aa, Homo sapiens
  REGION 1..28: note = ENSP00000407754
LHPFHVIRINKMLSCAGADSPIPSPPPR

SEQ ID NO: 35020 - protein, 131 aa, Homo sapiens
  REGION 1..131: note = ENSP00000405064
LHPFHVIRINKMLSCAGADRLQTGMRGAFGKPQGTVARVHIGQVIMSIRTKLQNKEHVIEALRRAKFKFPGRQKAYLALPVLGDLQKHIVEGVQLLLYGLRSGVQRDQHQAGKDCKAQGPRAAIHSWTFSP

SEQ ID NO: 35021 - protein, 91 aa, Homo sapiens
  REGION 1..91: note = ENSP00000398047
LHPFHVIRINKMLSCAGADRLQTGMRGAFGKPQGTVARVHIGQVIMSIRTKLQNKEHVIEALRRAKFKFPGRQKGAPIPAQTSLSPSLPHP

SEQ ID NO: 35022 - protein, 214 aa, Homo sapiens; identical to SEQ ID NO: 35013
  REGION 1..214: note = ENSP00000413436

SEQ ID NO: 35023 - protein, 178 aa, Homo sapiens
  REGION 1..178: note = ENSP00000479103
MGRRPARCYRYCKNKPYPKSRFCRGVPALEAARICANKYMVKSCGKDGFHIRVRLHPFHVIRINKMLSCAGADRLQTGMRGAFGKPQGTVARVHIGQVIMSIRTKLQNKEHVIEALRRAKFKFPGRQKIHISKKWGFTKFNADEFEDMVAEKRLIPDGCGVKYIPSRGPLDKWRALHS

SEQ ID NO: 35024 - protein, 109 aa, Homo sapiens
  REGION 1..109: note = ENSP00000314946
MNPALGNQTDVAGLFLANSSEALERAVRCCTQASVVTDDGFAEGGPDERSLYIMRVVQIAVMCVLSLTVVFGIFFLGCNLLIKSEGMINFLVKDRRPSKEVEAVVVGPY

SEQ ID NO: 35025 - protein, 263 aa, Homo sapiens
  REGION 1..263: note = ENSP00000250784
MARGPKKHLKRVAAPKHWMLDKLTGVFAPRPSTGPHKLRECLPLIVFLRNRLKYALTGDEVKKICMQRFIKIDGKVRVDVTYPAGFMDVISIEKTGEHFRLVYDTKGRFAVHRITVEEAKYKLCKVRKITVGVKGIPHLVTHDARTIRYPDPVIKVNDTVQIDLGTGKIINFIKFDTGNLCMVIGGANLGRVGVITNRERHPGSFDVVHVKDANGNSFATRLSNIFVIGNGNKPWISLPRGKGIRLTVAEERDKRLATKQSSG

SEQ ID NO: 35026 - protein, 262 aa, Homo sapiens
  REGION 1..262: note = ENSP00000415317
MLGRPAKFSKARGPKKHLKRVAAPKHWMLDKLTGVFAPRPSTGPHKLRECLPLIVFLRNRLKYALTGDEVKKICMQRFIKIDGKVRVDVTYPAGFMDVISIEKTGEHFRLVYDTKGRFAVHRITVEEAKYKLCKVRKITVGVKGIPHLVTHDARTIRYPDPVIKVNDTVQIDLGTGKIINFIKFDTGNLCMVIGGANLGRVGVITNRERHPGSFDVVHVKDANGNSFATRLSNIFVIGNGNKPWISLPRGKGIRLTVAEERD

SEQ ID NO: 35027 - protein, 56 aa, Homo sapiens
  REGION 1..56: note = ENSP00000485797
MPLAQLKEPWPLMELVPLDPEKQLLTSLEGSVAPVPKRAEGHLFLCLLTPGSRSSP

SEQ ID NO: 35028 - protein, 52 aa, Homo sapiens
  REGION 1..52: note = ENSP00000486119
MPLAQLKEPWPLMELVPLDPENGQTSGEEAGLQPSKYVTASGPRWRETSWLM

SEQ ID NO: 35029 - protein, 735 aa, Homo sapiens
  REGION 1..735: note = ENSP00000486881
MPLAQLKEPWPLMELVPLDPENGQTSGEEAGLQPSKDEGVLKEISITHHVKAGSEKADPSHFELLKVLGQGSFGKVFLVRKVTRPDSGHLYAMKVLKKATLKVRDRVRTKMERDILADVNHPFVVKLHYAFQTEGKLYLILDFLRGGDLFTRLSKEVMFTEEDVKFYLAELALGLDHLHSLGIIYRDLKPENILLDEEGHIKLTDFGLSKEAIDHEKKAYSFCGTVEYMAPEVVNRQGHSHSADWWSYGVLMFEMLTGSLPFQGKDRKETMTLILKAKLGMPQFLSTEAQSLLRALFKRNPANRLGSGPDGAEEIKRHVFYSTIDWNKLYRREIKPPFKPAVAQPDDTFYFDTEFTSRTPKDSPGIPPSAGAHQLFRGFSFVATGLMEDDGKPRAPQAPLHSVVQQLHGKNLVFSDGYVVKETIGVGSYSECKRCVHKATNMEYAVKVIDKSKRDPSEEIEILLRYGQHPNIITLKDVYDDGKHVYLVTELMRGGELLDKILRQKFFSEREASFVLHTIGKTVEYLHSQGVVHRDLKPSNILYVDESGNPECLRICDFGFAKQLRAENGLLMTPCYTANFVAPEVLKRQGYDEGCDIWSLGILLYTMLAGYTPFANGPSDTPEEILTRIGSGKFTLSGGNWNTVSETAKDLVSKMLHVDPHQRLTAKQVLQHPWVTQKDKLPQSQLSHQDLQLVKGAMAATYSALNSSKPTPQLKPIESSILAQRRVRKLPSTTL

SEQ ID NO: 35030 - protein, 724 aa, Homo sapiens
  REGION 1..724: note = ENSP00000486031
MPLAQLKEPWPLMELVPLDPENGQTSGEEAGLQPSKDEGVLKEISITHHVKAGSEKADPSHFELLKVLGQGSFGKVFLVRKVTRPDSGHLYAMKVLKKATLKVRDRVRTKMERDILADVNHPFVVKLHYAFQTEGKLYLILDFLRGGDLFTRLSKEVMFTEEDVKFYLAELALGLDHLHSLGIIYRDLKPENILLDEEGHIKLTDFGLSKEAIDHEKKAYSFCGTVEYMAPEVVNRQGHSHSADWWSYGVLMGKDRKETMTLILKAKLGMPQFLSTEAQSLLRALFKRNPANRLGSGPDGAEEIKRHVFYSTIDWNKLYRREIKPPFKPAVAQPDDTFYFDTEFTSRTPKDSPGIPPSAGAHQLFRGFSFVATGLMEDDGKPRAPQAPLHSVVQQLHGKNLVFSDGYVVKETIGVGSYSECKRCVHKATNMEYAVKVIDKSKRDPSEEIEILLRYGQHPNIITLKDVYDDGKHVYLVTELMRGGELLDKILRQKFFSEREASFVLHTIGKTVEYLHSQGVVHRDLKPSNILYVDESGNPECLRICDFGFAKQLRAENGLLMTPCYTANFVAPEVLKRQGYDEGCDIWSLGILLYTMLAGYTPFANGPSDTPEEILTRIGSGKFTLSGGNWNTVSETAKDLVSKMLHVDPHQRLTAKQVLQHPWVTQKDKLPQSQLSHQDLQLVKGAMAATYSALNSSKPTPQLKPIESSILAQRRVRKLPSTTL

SEQ ID NO: 35031 - protein, 643 aa, Homo sapiens
  REGION 1..643: note = ENSP00000487166
MKVLKKATLKVRDRVRTKMERDILADVNHPFVVKLHYAFQTEGKLYLILDFLRGGDLFTRLSKEVMFTEEDVKFYLAELALGLDHLHSLGIIYRDLKPENILLDEEGHIKLTDFGLSKEAIDHEKKAYSFCGTVEYMAPEVVNRQGHSHSADWWSYGVLMFEMLTGSLPFQGKDRKETMTLILKAKLGMPQFLSTEAQSLLRALFKRNPANRLGSGPDGAEEIKRHVFYSTIDWNKLYRREIKPPFKPAVAQPDDTFYFDTEFTSRTPKDSPGIPPSAGAHQLFRGFSFVATGLMEDDGKPRAPQAPLHSVVQQLHGKNLVFSDGYVVKETIGVGSYSECKRCVHKATNMEYAVKVIDKSKRDPSEEIEILLRYGQHPNIITLKDVYDDGKHVYLVTELMRGGELLDKILRQKFFSEREASFVLHTIGKTVEYLHSQGVVHRDLKPSNILYVDESGNPECLRICDFGFAKQLRAENGLLMTPCYTANFVAPEVLKRQGYDEGCDIWSLGILLYTMLAGYTPFANGPSDTPEEILTRIGSGKFTLSGGNWNTVSETAKDLVSKMLHVDPHQRLTAKQVLQHPWVTQKDKLPQSQLSHQDLQLVKGAMAATYSALNSSKPTPQLKPIESSILAQRRVRKLPSTTL

SEQ ID NO: 35032 - protein, 112 aa, Homo sapiens
  REGION 1..112: note = ENSP00000487239
MKVLKKATLKVRDRVRTKMERDILADVNHPFVVKLHYAFQTEGKLYLILDFLRGGDLFTRLSKEVMFTEEDVKFYLAELALGLDHLHSLGIIYRDLKPENILLDEEGHIKLT

SEQ ID NO: 35033 - protein, 719 aa, Homo sapiens
  REGION 1..719: note = ENSP00000487553
MQTPADFPRVERDLVPCPRKDEGVLKEISITHHVKAGSEKADPSHFELLKVLGQGSFGKVFLVRKVTRPDSGHLYAMKVLKKATLKVRDRVRTKMERDILADVNHPFVVKLHYAFQTEGKLYLILDFLRGGDLFTRLSKEVMFTEEDVKFYLAELALGLDHLHSLGIIYRDLKPENILLDEEGHIKLTDFGLSKEAIDHEKKAYSFCGTVEYMAPEVVNRQGHSHSADWWSYGVLMFEMLTGSLPFQGKDRKETMTLILKAKLGMPQFLSTEAQSLLRALFKRNPANRLGSGPDGAEEIKRHVFYSTIDWNKLYRREIKPPFKPAVAQPDDTFYFDTEFTSRTPKDSPGIPPSAGAHQLFRGFSFVATGLMEDDGKPRAPQAPLHSVVQQLHGKNLVFSDGYVVKETIGVGSYSECKRCVHKATNMEYAVKVIDKSKRDPSEEIEILLRYGQHPNIITLKDVYDDGKHVYLVTELMRGGELLDKILRQKFFSEREASFVLHTIGKTVEYLHSQGVVHRDLKPSNILYVDESGNPECLRICDFGFAKQLRAENGLLMTPCYTANFVAPEVLKRQGYDEGCDIWSLGILLYTMLAGYTPFANGPSDTPEEILTRIGSGKFTLSGGNWNTVSETAKDLVSKMLHVDPHQRLTAKQVLQHPWVTQKDKLPQSQLSHQDLQLVKGAMAATYSALNSSKPTPQLKPIESSILAQRRVRKLPSTTL

SEQ ID NO: 35034 - protein, 111 aa, Homo sapiens
  REGION 1..111: note = ENSP00000487154
MQTPADFPRVERDLVPCPRKVQQQEPTALPLTPSWGSLPCCLPVCLPGVRPICPRMRASSRRSPSRTTSRLALRRLIHPISSSSRFWARDPLAKSSWCGKSPGLTVGTCML

SEQ ID NO: 35035 - protein, 204 aa, Homo sapiens
  REGION 1..204: note = ENSP00000486849
MEQDPKPPRLRLWALIPWLPRKQRPRISQTSLPVPGPGSGPQRDSDEGVLKEISITHHVKAGSEKADPSHFELLKVLGQGSFGKVFLVRKVTRPDSGHLYAMKVLKKATLKVRDRVRTKMERDILADVNHPFVVKLHYAFQTEGKLYLILDFLRGGDLFTRLSKEVIYMIQKKNIHEEVFLPPQPPLFPSIGDVHGGGCEVLPG

SEQ ID NO: 35036 - protein, 744 aa, Homo sapiens
  REGION 1..744: note = ENSP00000487349
MEQDPKPPRLRLWALIPWLPRKQRPRISQTSLPVPGPGSGPQRDSDEGVLKEISITHHVKAGSEKADPSHFELLKVLGQGSFGKVFLVRKVTRPDSGHLYAMKVLKKATLKVRDRVRTKMERDILADVNHPFVVKLHYAFQTEGKLYLILDFLRGGDLFTRLSKEVMFTEEDVKFYLAELALGLDHLHSLGIIYRDLKPENILLDEEGHIKLTDFGLSKEAIDHEKKAYSFCGTVEYMAPEVVNRQGHSHSADWWSYGVLMFEMLTGSLPFQGKDRKETMTLILKAKLGMPQFLSTEAQSLLRALFKRNPANRLGSGPDGAEEIKRHVFYSTIDWNKLYRREIKPPFKPAVAQPDDTFYFDTEFTSRTPKDSPGIPPSAGAHQLFRGFSFVATGLMEDDGKPRAPQAPLHSVVQQLHGKNLVFSDGYVVKETIGVGSYSECKRCVHKATNMEYAVKVIDKSKRDPSEEIEILLRYGQHPNIITLKDVYDDGKHVYLVTELMRGGELLDKILRQKFFSEREASFVLHTIGKTVEYLHSQGVVHRDLKPSNILYVDESGNPECLRICDFGFAKQLRAENGLLMTPCYTANFVAPEVLKRQGYDEGCDIWSLGILLYTMLAGYTPFANGPSDTPEEILTRIGSGKFTLSGGNWNTVSETAKDLVSKMLHVDPHQRLTAKQVLQHPWVTQKDKLPQSQLSHQDLQLVKGAMAATYSALNSSKPTPQLKPIESSILAQRRVRKLPSTTL

SEQ ID NO: 35037 - protein, 166 aa, Homo sapiens
  REGION 1..166: note = ENSP00000486179
AQPDDTFYFDTEFTSRTPKDSPGIPPSAGAHQLFRGFSFVATGLMEDDGKPRAPQAPLHSVVQVIDKSKRDPSEEIEILLRYGQHPNIITLKDVYDDGKHVYLVTELMRGGELLDKILRQKFFSEREASFVLHTIGKTVEYLHSQGVVHRDLKPSNILYVDESGNP

SEQ ID NO: 35038 - protein, 115 aa, Homo sapiens
  REGION 1..115: note = ENSP00000487207
NTVSETAKDLVSKMLHVDPHQRLTAKQVLQHPWVTQKDKLPQSQLSHQDLQLVKGAMAATYSALNSSKPTPQLKPIESSILAQRRVRKLPSTTLMDSSRLRLCWWKAIHCINFFL

SEQ ID NO: 35039 - protein, 56 aa, Homo sapiens; identical to SEQ ID NO: 35027
  REGION 1..56: note = ENSP00000434616

SEQ ID NO: 35040 - protein, 52 aa, Homo sapiens; identical to SEQ ID NO: 35028
  REGION 1..52: note = ENSP00000436990

SEQ ID NO: 35041 - protein, 735 aa, Homo sapiens; identical to SEQ ID NO: 35029
  REGION 1..735: note = ENSP00000363283

SEQ ID NO: 35042 - protein, 724 aa, Homo sapiens; identical to SEQ ID NO: 35030
  REGION 1..724: note = ENSP00000363281

SEQ ID NO: 35043 - protein, 643 aa, Homo sapiens; identical to SEQ ID NO: 35031
  REGION 1..643: note = ENSP00000431651

SEQ ID NO: 35044 - protein, 112 aa, Homo sapiens; identical to SEQ ID NO: 35032
  REGION 1..112: note = ENSP00000433039

SEQ ID NO: 35045 - protein, 719 aa, Homo sapiens; identical to SEQ ID NO: 35033
  REGION 1..719: note = ENSP00000432281

SEQ ID NO: 35046 - protein, 111 aa, Homo sapiens; identical to SEQ ID NO: 35034
  REGION 1..111: note = ENSP00000355831

SEQ ID NO: 35047 - protein, 204 aa, Homo sapiens; identical to SEQ ID NO: 35035
  REGION 1..204: note = ENSP00000363278

SEQ ID NO: 35048 - protein, 744 aa, Homo sapiens; identical to SEQ ID NO: 35036
  REGION 1..744: note = ENSP00000435412

SEQ ID NO: 35049 - protein, 166 aa, Homo sapiens; identical to SEQ ID NO: 35037
  REGION 1..166: note = ENSP00000383967

SEQ ID NO: 35050 - protein, 115 aa, Homo sapiens; identical to SEQ ID NO: 35038
  REGION 1..115: note = ENSP00000403548

SEQ ID NO: 35051 - protein, 802 aa, Homo sapiens
  REGION 1..802: note = ENSP00000479667
MEEEGGSSGGAAGTSADGGDGGEQLLTVKHELRTANLTGHAEKVGIENFELLKVLGTGAYGKVFLVRKISGHDTGKLYAMKVLKKATIVQKAKTTEHTRTERQVLEHIRQSPFLVTLHYAFQTETKLHLILDYINGGELFTHLSQRERFTEHEVQIYVGEIVLALEHLHKLGIIYRDIKLENILLDSNGHVVLTDFGLSKEFVADETERAYSFCGTIEYMAPDIVRGGDSGHDKAVDWWSLGVLMYELLTGASPFTVDGEKNSQAEISRRILKSEPPYPQEMSALAKDLIQRLLMKDPKKRLGCGPRDADEIKEHLFFQKINWDDLAAKKVPAPFKPVIRDELDVSNFAEEFTEMDPTYSPAALPQSSEKLFQGYSFVAPSILFKRNAAVIDPLQFHMGVERPGVTNVARSAMMKDSPFYQHYDLDLKDKPLGEGSFSICRKCVHKKSNQAFAVKIISKRMEANTQKEITALKLCEGHPNIVKLHEVFHDQLHTFLVMELLNGGELFERIKKKKHFSETEASYIMRKLVSAVSHMHDVGVVHRDLKPENLLFTDENDNLEIKIIDFGFARLKPPDNQPLKTPCFTLHYAAPELLNQNGYDESCDLWSLGVILYTMLSGQVPFQSHDRSLTCTSAVEIMKKIKKGDFSFEGEAWKNVSQEAKDLIQGLLTVDPNKRLKMSGLRYNEWLQDGSQLSSNPLMTPDILGSSGAAVHTCVKATFHAFNKYKREGFCLQNVDKAPLAKRRKMKKTSTSTETRSSSSESSHSSSSHSHGKTTPTKTLQPSNPADSNNPETLFQFSDSVA

SEQ ID NO: 35052 - protein, 723 aa, Homo sapiens
  REGION 1..723: note = ENSP00000442803
MKVLKKATIVQKAKTTEHTRTERQVLEHIRQSPFLVTLHYAFQTETKLHLILDYINGGELFTHLSQRERFTEHEVQIYVGEIVLALEHLHKLGIIYRDIKLENILLDSNGHVVLTDFGLSKEFVADETERAYSFCGTIEYMAPDIVRGGDSGHDKAVDWWSLGVLMYELLTGASPFTVDGEKNSQAEISRRILKSEPPYPQEMSALAKDLIQRLLMKDPKKRLGCGPRDADEIKEHLFFQKINWDDLAAKKVPAPFKPVIRDELDVSNFAEEFTEMDPTYSPAALPQSSEKLFQGYSFVAPSILFKRNAAVIDPLQFHMGVERPGVTNVARSAMMKDSPFYQHYDLDLKDKPLGEGSFSICRKCVHKKSNQAFAVKIISKRMEANTQKEITALKLCEGHPNIVKLHEVFHDQLHTFLVMELLNGGELFERIKKKKHFSETEASYIMRKLVSAVSHMHDVGVVHRDLKPENLLFTDENDNLEIKIIDFGFARLKPPDNQPLKTPCFTLHYAAPELLNQNGYDESCDLWSLGVILYTMLSGQVPFQSHDRSLTCTSAVEIMKKIKKGDFSFEGEAWKNVSQEAKDLIQGLLTVDPNKRLKMSGLRYNEWLQDGSQLSSNPLMTPDILGSSGAAVHTCVKATFHAFNKYKREGFCLQNVDKAPLAKRRKMKKTSTSTETRSSSSESSHSSSSHSHGKTTPTKTLQPSNPADSNNPETLFQFSDSVA

SEQ ID NO: 35053 - protein, 79 aa, Homo sapiens
  REGION 1..79: note = ENSP00000451305
  VARIANT 1: note = Any amino acid
XYGKVFLVRKISGHDTGKLYAMKVLKKATIVQKAKTTEHTRTERQVLEHIRQSPFLVTLHYAFQTETKLHLILVGDYIS

SEQ ID NO: 35054 - protein, 549 aa, Homo sapiens
  REGION 1..549: note = ENSP00000402787
MEEEGGSSGGAAGTSADGGDGGEQLLTVKHELRTANLTGHAEKVGIENFELLKVLGTGAYGKVFLVRKISGHDTGKLYAMKVLKKATIVQKAKTTEHTRTERQVLEHIRQSPFLVTLHYAFQTETKLHLILDYINGGELFTHLSQRERFTEHEVQIYVGEIVLALEHLHKLGIIYRDIKLENILLDSNGHVVLTDFGLSKEFVADETERAYSFCGTIEYMAPDIVRGGDSGHDKAVDWWSLGVLMYELLTGASPFTVDGEKNSQAEISRRILKSEPPYPQEMSALAKDLIQRLLMKDPKKRLGCGPRDADEIKEHLFFQKINWDDLAAKKVPAPFKPVIRDELDVSNFAEEFTEMDPTYSPAALPQSSEKLFQGYSFVAPSILFKRNAAVIDPLQFHMGVERPGVTNVARSAMMKDSPFYQHYDLDLKDKPLGEGSFSICRKCVHKKSNQAFAVKIISKRMEANTQKEITALKLCEGHPNIVKLHEVFHDQLHTFLVMELLNGGELFERIKKKKHFSETEASYIMRKLVSAVSHMHDVGVVHRDLKPEV

SEQ ID NO: 35055 - protein, 219 aa, Homo sapiens
  REGION 1..219: note = ENSP00000450591
MEEEGGSSGGAAGTSADGGDGGEQLLTVKHELRTANLTGHAEKVGIENFELLKVLGTGAYGKVFLVRKISGHDTGKLYAMKVLKKATIVQKAKTTEHTRTERQVLEHIRQSPFLVTLHYAFQTETKLHLILDYINGGELFTHLSQRERFTEHEVQIYVGEIVLALEHLHKLGIIYRDIKLENILLDSNGHVVLTDFGLSKEFVADELEIKSLFCLFVQD

SEQ ID NO: 35056 - protein, 83 aa, Homo sapiens
  REGION 1..83: note = ENSP00000451736
MEEEGGSSGGAAGTSADGGDGGEQLLTVKHELRTETSLLCCPGWSVVLISAHYNLRLLGSSDSPASASQVAGITGTHYHTQLI

SEQ ID NO: 35057 - protein, 144 aa, Homo sapiens
  REGION 1..144: note = ENSP00000405054
  VARIANT 1: note = Any amino acid
XAVTDGIPAASEGKIQAALKLEHIDGVNLTVPVKAPSRKDILEGVKKTLSHFRVVATGSGCALVQLQPLTVFSSQLQVHMVLQLCPVLGDHMYSARVGTVLGQRFLLPAENNKPQRQVLQPTCLLLSEGWRERSWMKPSSDAST

SEQ ID NO: 35058 - protein, 336 aa, Homo sapiens
  REGION 1..336: note = ENSP00000398921
MRAVLAREMDGRRVLGRFWSGWRRGLGVRPVPEDAGFGTEARHQRQPRGSCQRSGPLGDQPFAGLLPKNLSREELVDALRAAVVDRKGKPGELTLFSVLPELSQSLGLREQELQVVRASGKESSGLVLLSSCPQTASRLQKYFTHARRAQRPTATYCAVTDGIPAASEGKIQAALKLEHIDGVNLTVPVKAPSRKDILEGVKKTLSHFRVVATGSGCALVQLQPLTVFSSQLQVHMVLQLCPVLGDHMYSARVGTVLGQRFLLPAENNKPQRQVLDEALLRRLHLTPSQAAQLPLHLHLHRLLLPGTRARDTPVELLAPLPPYFSRTLQCLGLRLQ

SEQ ID NO: 35059 - protein, 351 aa, Homo sapiens
  REGION 1..351: note = ENSP00000373331
MRAVLAREMDGRRVLGRFWSGWRRGLGVRPVPEDAGFGTEARHQRQPRGSCQRSGPLGDQPFAGLLPKNLSREELVDALRAAVVDRKGPLVTLNKPQGLPVTGKPGELTLFSVLPELSQSLGLREQELQVVRASGKESSGLVLLSSCPQTASRLQKYFTHARRAQRPTATYCAVTDGIPAASEGKIQAALKLEHIDGVNLTVPVKAPSRKDILEGVKKTLSHFRVVATGSGCALVQLQPLTVFSSQLQVHMVLQLCPVLGDHMYSARVGTVLGQRFLLPAENNKPQRQVLDEALLRRLHLTPSQAAQLPLHLHLHRLLLPGTRARDTPVELLAPLPPYFSRTLQCLGLRLQ

SEQ ID NO: 35060 - protein, 212 aa, Homo sapiens
  REGION 1..212: note = ENSP00000408693
MGPVVPEFSRHQRQPRGSCQRSGPLGDQPFAGLLPKNLSREELVDALRAAVVDRKGPLVTLNKPQGLPVTGKPGELTLFSVLPELSQSLGLREQELQVVRASGKESSGLVLLSSCPQTASRLQKYFTHARRAQRPTATYCAVTDGIPAASEGKIQAALKLEHIDGVNLTVPVKAPSRKDILEGVKKTLSHFRVVATGSGCALVQLQPLTGPG

SEQ ID NO: 35061 - protein, 280 aa, Homo sapiens
  REGION 1..280: note = ENSP00000400397
  VARIANT 1: note = Any amino acid
XGRRVLGRFWSGWRRGLGVRPVPEDAGFGTEARHQRQPRGSCQRSGPLGDQPFAGLLPKNLSREELVDALRAAVVDRKGPLVTLNKPQGLPVTGKPGELTLFSVLPELSQSLGLREQELQVVRASGKESSGLVLLSSCPQTASRLQKYFTHARRAQRPTATYCAVTDGIPAASEGKIQAALKLEHIDGVNLACSLLAGTTDSSSEGPIPKGHPGRCQEDSQSLSCGSHRLWLCPGPAAATDSVLQSTTGAHGTTALPCAWGPHVLCPCGHCPGPAISAAS

SEQ ID NO: 35062 - protein, 246 aa, Homo sapiens
  REGION 1..246: note = ENSP00000415616
LAREMDGRRVLGRFWSGWRRGLGVRPVPEDAGFGTEARHQRQPRGSCQRSGPLGDQPFAGLLPKNLSREELVDALRAAVVDRKGPLVTLNKPQGLPVTGKPGELTLFSVLPELSQSLGLREQELQVVRASGKESSGLVLLSSCPQTASRLQKYFTHARRAQRPTATYCAVTDGIPAASEGKIQAALKLEHIDGVNLTVPVKAPSRKDILEGVKKTLSHFRVVATGSGCALVQLQPLTGRSGTLASL

SEQ ID NO: 35063 - protein, 151 aa, Homo sapiens
  REGION 1..151: note = ENSP00000395446
NQRAGWSAGLPLWTHMRAVLAREMDGRRVLGRFWSGWRRGLGVRPVPEDAGFGTEARHQRQPRGSCQRSGPLGDQPFAGLLPKNLSREELVDALRAAVVDRKGPLVTLNKPQGLPVTGKPGELTLFSVLPELSQSLGLREQELQVVRASGK

SEQ ID NO: 35064 - protein, 102 aa, Homo sapiens
  REGION 1..102: note = ENSP00000396405
  VARIANT 1: note = Any amino acid
XVLGRFWSGWRRGLGVRPVPEDAGFGTEARTSSDVEQATGSTSDRKTRRADVVLSAARAEPVPRAQGAGASGCPSIWEVSGRGDRKLGVQASICGGETAAWG

SEQ ID NO: 35065 - protein, 36 aa, Homo sapiens
  REGION 1..36: note = ENSP00000395492
  VARIANT 1: note = Any amino acid
XEMDGRRVLGRFWSGWRRGLGVRPVPEDAGFGTEAR

SEQ ID NO: 35066 - protein, 277 aa, Homo sapiens
  REGION 1..277: note = ENSP00000357201
MPGISARGLSHEGRKQLAVNLTRVLALYRSILDAYIIEFFTDNLWDTLPCSWQEALDGLKPPQLATMLLGMPGEGEVVRYRSVWPLTLLALKSTACALAFTRMPGFQTPSEFLENPSQSSRLTAPFRKHVRPKKQHEIRRLGELVKKLSDFTGCTQVVDVGSGQGHLSRFMALGLGLMVKSIEGDQRLVERAQRLDQELLQALEKEEKRNPQICAAGATASGARSPAATESGCPSGPRGPGEPCGGLLQPGSTACPTGGDAYSTGPAAVPSGTGFPC

SEQ ID NO: 35067 - protein, 475 aa, Homo sapiens
  REGION 1..475: note = ENSP00000357199
MPGISARGLSHEGRKQLAVNLTRVLALYRSILDAYIIEFFTDNLWDTLPCSWQEALDGLKPPQLATMLLGMPGEGEVVRYRSVWPLTLLALKSTACALAFTRMPGFQTPSEFLENPSQSSRLTAPFRKHVRPKKQHEIRRLGELVKKLSDFTGCTQVVDVGSGQGHLSRFMALGLGLMVKSIEGDQRLVERAQRLDQELLQALEKEEKRNPQVVQTSPRHSPHHVVRWVDPTALCEELLLPLENPCQGRARLLLTGLHACGDLSVALLRHFSCCPEVVALASVGCCYMKLSDPGGYPLSQWVAGLPGYELPYRLREGACHALEEYAERLQKAGPGLRTHCYRAALETVIRRARPELRRPGVQGIPRVHELKIEEYVQRGLQRVGLDPQLPLNLAALQAHVAQENRVVAFFSLALLLAPLVETLILLDRLLYLQEQGFHAELLPIFSPELSPRNLVLVATKMPLGQALSVLETEDS

SEQ ID NO: 35068 - protein, 345 aa, Homo sapiens
  REGION 1..345: note = ENSP00000429756
MPGISARGLSHEGRKQLAVNLTRVLALYRSILDAYIIEFFTDNLWDTLPCSWQEALDGLKPPQLATMLLGMPGEGEVVRYRSVWPLTLLALKSTACALAFTRMPGFQTPSEFLENPSQSSRLTAPFRKHVRPKKQHEIRRLGEGHLSRFMALGLGLMVKSIEGDQRLVERAQRLDQELLQALEKEEKRNPQVVQTSPRHSPHHVVRWVDPTALCEELLLPLENPCQGRARLLLTGLHACGDLSVALLRHFSCCPEVVALASVGCCYMKLSDPGGYPLSQWVAGLPGYELPYRLREGACHALEEYAERLQKAGPGLRTHCYRAALETVIRRARPELRRPGVQGIPR

SEQ ID NO: 35069 - protein, 94 aa, Homo sapiens
  REGION 1..94: note = ENSP00000429389
MPGISARGLSHEGRKQLAVNLTRVLALYRSILDAYIIVQVSVATHPAGPEVHGVCPGLYPDAWLSDPLRIPGEPQPELPTNSSIPETCQAQEAA

SEQ ID NO: 35070 - protein, 100 aa, Homo sapiens
  REGION 1..100: note = ENSP00000429053
MPGFQTPSEFLENPSQSSRLTAPFRKHVRPKKQHEIRRLGELVKKLSDFTGCTQVVDVGSGQGHLSRFMALGLGLMVKSIEGDQRLVERAQRLDQELLQA

SEQ ID NO: 35071 - protein, 154 aa, Homo sapiens
  REGION 1..154: note = ENSP00000430787
MPGFQTPSEFLENPSQSSRLTAPFRKHVRPKKQHEIRRLGEGHLSRFMALGLGLMVKSIEGDQRLVERAQRLDQELLQALEKEEKRNPQICAAGATASGARSPAATESGCPSGPRGPGEPCGGLLQPGSTACPTGGDAYSTGPAAVPSGTGFPC

SEQ ID NO: 35072 - protein, 139 aa, Homo sapiens
  REGION 1..139: note = ENSP00000429800
  VARIANT 1: note = Any amino acid
XNPSQSSRLTAPFRKHVRPKKQHEIRRLGELVKKLSDFTGCTQVVDVGSGQGHLSRFMALGLGLMVKSIEGDQRLVERAQRLDQELLQALEKEEKRNPQVVQTSPRHSPHHVVRYVQRGLQRVGLDPQLPLNLAALQAH

SEQ ID NO: 35073 - protein, 236 aa, Homo sapiens
  REGION 1..236: note = ENSP00000481178
MIFRVSAEGSQACAKGCELCSEVNGCLKCSPKLFILLERNDIRQVGVCLPSCPPGYFDARNPDMNKCIKCKIEHCEACFSHNFCTKCKEGLYLHKGRCYPACPEGSSAANGTMECSSPAQCEMSEWSPWGPCSKKQQLCGFRRGSEERTRRVLHAPVGDHAACSDTKETRRCTVRRVPCPEGQKRRKGGQGRRENANRNLARKESKEAGAGSRRRKGQQQQQQQGTVGPLTSAGPA

SEQ ID NO: 35074 - protein, 200 aa, Homo sapiens
  REGION 1..200: note = ENSP00000479832
MRLGLCVVALVLSWTHLTISSRGIKGKRQRRISAEGSQACAKGCELCSEVNGCLKCSPKLFILLERNDIRQVGVCLPSCPPGYFDARNPDMNKCIKCKIEHCEACFSHNFCTKCKEGLYLHKGRCYPACPEGSSAANGTMECSSPGQKRRKGGQGRRENANRNLARKESKEAGAGSRRRKGQQQQQQQGTVGPLTSAGPA

SEQ ID NO: 35075 - protein, 263 aa, Homo sapiens
  REGION 1..263: note = ENSP00000348944
MRLGLCVVALVLSWTHLTISSRGIKGKRQRRISAEGSQACAKGCELCSEVNGCLKCSPKLFILLERNDIRQVGVCLPSCPPGYFDARNPDMNKCIKCKIEHCEACFSHNFCTKCKEGLYLHKGRCYPACPEGSSAANGTMECSSPAQCEMSEWSPWGPCSKKQQLCGFRRGSEERTRRVLHAPVGDHAACSDTKETRRCTVRRVPCPEGQKRRKGGQGRRENANRNLARKESKEAGAGSRRRKGQQQQQQQGTVGPLTSAGPA

SEQ ID NO: 35076 - protein, 263 aa, Homo sapiens; identical to SEQ ID NO: 35075
  REGION 1..263: note = ENSP00000383846

SEQ ID NO: 35077 - protein, 176 aa, Homo sapiens
  REGION 1..176: note = ENSP00000428940
MRQYGECLHSCPSGYYGHRAPDMNRCARCRIENCDSCFSKDFCTKCKVGFYLHRGRCFDECPDGFAPLEETMECVEGCEVGHWSEWGTCSRNNRTCGFKWGLETRTRQIVKKPVKDTILCPTIAESRRCKMTMRHCPGGKRTPKAKEKRNKKKKRKLIERAQEQHSVFLATDRANQ

SEQ ID NO: 35078 - protein, 179 aa, Homo sapiens
  REGION 1..179: note = ENSP00000427937
MQFRLFSFALIILNCMDYSHCQGNRWRRSKRGCRIENCDSCFSKDFCTKCKVGFYLHRGRCFDECPDGFAPLEETMECVGCEVGHWSEWGTCSRNNRTCGFKWGLETRTRQIVKKPVKDTILCPTIAESRRCKMTMRHCPGGKRTPKAKEKRNKKKKRKLIERAQEQHSVFLATDRANQ

SEQ ID NO: 35079 - protein, 243 aa, Homo sapiens
  REGION 1..243: note = ENSP00000276659
MQFRLFSFALIILNCMDYSHCQGNRWRRSKRASYVSNPICKGCLSCSKDNGCSRCQQKLFFFLRREGMRQYGECLHSCPSGYYGHRAPDMNRCARCRIENCDSCFSKDFCTKCKVGFYLHRGRCFDECPDGFAPLEETMECVEGCEVGHWSEWGTCSRNNRTCGFKWGLETRTRQIVKKPVKDTILCPTIAESRRCKMTMRHCPGGKRTPKAKEKRNKKKKRKLIERAQEQHSVFLATDRANQ

SEQ ID NO: 35080 - protein, 168 aa, Homo sapiens
  REGION 1..168: note = ENSP00000428614
MRQYGECLHSCPSGYYGHRAPDMNRCARCRIENCDSCFSKDFCTKCKVGFYLHRGRCFDECPDGFAPLEETMECVEGCEVGHWSEWGTCSRNNRTCGFKWGLETRTRQIVKKPVKDTILCPTIAESRRCKMTMRHCPGGKRTPKAKEKRNKKKKRKLIERAQEQHSVF

SEQ ID NO: 35081 - protein, 89 aa, Homo sapiens
  REGION 1..89: note = ENSP00000430485
MRQYGECLHSCPSGYYGHRAPDMNRCARCRIENCDSCFSKDFCTKCKVGFYLHRGRCFDECPDGFAPLEETMECVEGCEVGHWSEWGTC

SEQ ID NO: 35082 - protein, 121 aa, Homo sapiens
  REGION 1..121: note = ENSP00000430010
MQFRLFSFALIILNCMDYSHCQGNRWRRSKRASYVSNPICKGCLSCSKDNGCSRCQQKLFFFLRREGMRQYGECLHSCPSGYYGHRAPDMNRCARCRIENCDSCFSKDFCTKCKVGFYLHR

SEQ ID NO: 35083 - protein, 89 aa, Homo sapiens
  REGION 1..89: note = ENSP00000429159
MDLASYVSNPICKGCLSCSKDNGCSRCQQKLFFFLRREGMRQYGECLHSCPSGYYGHRAPDMNRCARCRIENCDSCFSKDFCTKCKVGF

SEQ ID NO: 35084 - protein, 76 aa, Homo sapiens
  REGION 1..76: note = ENSP00000430973
MQFRLFSFALIILNCMDYSHCQGNRWRRSKRASYVSNPICKGCLSCSKDNGCSRCQQKLFFFLRREGMRQYGECLH

SEQ ID NO: 35085 - protein, 234 aa, Homo sapiens
  REGION 1..234: note = ENSP00000217260
MRAPLCLLLLVAHAVDMLALNRRKKQVGTGLGGNCTGCIICSEENGCSTCQQRLFLFIRREGIRQYGKCLHDCPPGYFGIRGQEVNRCKKCGATCESCFSQDFCIRCKRQFYLYKGKCLPTCPPGTLAHQNTRECQGECELGPWGGWSPCTHNGKTCGSAWGLESRVREAGRAGHEEAATCQVLSESRKCPIQRPCPGERSPGQKKGRKDRRPRKDRKLDRRLDVRPRQPGLQP

SEQ ID NO: 35086 - protein, 172 aa, Homo sapiens
  REGION 1..172: note = ENSP00000383475
MRAPLCLLLLVAHAVDMLALNRRKKQVGTGLGGNCTGCIICSEENGCSTCQQRLFLFIRREGIRQYGKCLHDCPPGYFGIRGQEVNRCKKCGATCESCFSQDFCIRCKRQFYLYKGKCLPTCPPGTLAHQNTRECQERSPGQKKGRKDRRPRKDRKLDRRLDVRPRQPGLQP

SEQ ID NO: 35087 - protein, 193 aa, Homo sapiens
  REGION 1..193: note = ENSP00000378525
MPFLPAIDLLYWRDIKQTGIVFGSFLLLLFSLTQFSVVSVVAYLALAALSATISFRIYKSVLQAVQKTDEGHPFKAYLELEITLSQEQIQKYTDCLQFYVNSTLKELRRLFLVQDLVDSLKFAVLMWLLTYVGALFNGLTLLLMAVVSMFTLPVVYVKHQAQIDQYLGLVRTHINAVVAKIQAKIPGAKRHAE

SEQ ID NO: 35088 - protein, 208 aa, Homo sapiens
  REGION 1..208: note = ENSP00000340716
MQATADSTKMDCVWSNWKSQAIDLLYWRDIKQTGIVFGSFLLLLFSLTQFSVVSVVAYLALAALSATISFRIYKSVLQAVQKTDEGHPFKAYLELEITLSQEQIQKYTDCLQFYVNSTLKELRRLFLVQDLVDSLKFAVLMWLLTYVGALFNGLTLLLMAVVSMFTLPVVYVKHQAQIDQYLGLVRTHINAVVAKIQAKIPGAKRHAE

SEQ ID NO: 35089 - protein, 776 aa, Homo sapiens
  REGION 1..776: note = ENSP00000267484
MAAPGDPQDELLPLAGPGSQWLRHRGEGENEAVTPKGATPAPQAGEPSPGLGARAREAASREAGSGPARQSPVAMETASTGVAGVSSAMDHTFSTTSKDGEGSCYTSLISDICYPPQEDSTYFTGILQKENGHVTISESPEELGTPGPSLPDVPGIESRGLFSSDSGIEMTPAESTEVNKILADPLDQMKAEAYKYIDITRPEEVKHQEQHHPELEDKDLDFKNKDTDISIKPEGVREPDKPAPVEGKIIKDHLLEESTFAPYIDDLSEEQRRAPQITTPVKITLTEIEPSVETTTQEKTPEKQDICLKPSPDTVPTVTVSEPEDDSPGSITPPSSGTEPSAAESQGKGSISEDELITAIKEAKGLSYETAENPRPVGQLADRPEVKARSGPPTIPSPLDHEASSAESGDSEIELVSEDPMAAEDALPSGYVSFGHVGGPPPSPASPSIQYSILREEREAELDSELIIESCDASSASEESPKREQDSPPMKPSALDAIREETGVRAEERAPSRRGLAEPGSFLDYPSTEPQPGPELPPGDGALEPETPMLPRKPEEDSSSNQSPAATKGPGPLGPGAPPPLLFLNKQKAIDLLYWRDIKQTGIVFGSFLLLLFSLTQFSVVSVVAYLALAALSATISFRIYKSVLQAVQKTDEGHPFKAYLELEITLSQEQIQKYTDCLQFYVNSTLKELRRLFLVQDLVDSLKFAVLMWLLTYVGALFNGLTLLLMAVVSMFTLPVVYVKHQAQIDQYLGLVRTHINAVVAKIQAKIPGAKRHAE

SEQ ID NO: 35090 - protein, 702 aa, Homo sapiens
  REGION 1..702: note = ENSP00000483039
METASTGVAGVSSAMDHTFSTTSKDGEGSCYTSLISDICYPPQEDSTYFTGILQKENGHVTISESPEELGTPGPSLPDVPGIESRGLFSSDSGIEMTPAESTEVNKILADPLDQMKAEAYKYIDITRPEEVKHQEQHHPELEDKDLDFKNKDTDISIKPEGVREPDKPAPVEGKIIKDHLLEESTFAPYIDDLSEEQRRAPQITTPVKITLTEIEPSVETTTQEKTPEKQDICLKPSPDTVPTVTVSEPEDDSPGSITPPSSGTEPSAAESQGKGSISEDELITAIKEAKGLSYETAENPRPVGQLADRPEVKARSGPPTIPSPLDHEASSAESGDSEIELVSEDPMAAEDALPSGYVSFGHVGGPPPSPASPSIQYSILREEREAELDSELIIESCDASSASEESPKREQDSPPMKPSALDAIREETGVRAEERAPSRRGLAEPGSFLDYPSTEPQPGPELPPGDGALEPETPMLPRKPEEDSSSNQSPAATKGPGPLGPGAPPPLLFLNKQKAIDLLYWRDIKQTGIVFGSFLLLLFSLTQFSVVSVVAYLALAALSATISFRIYKSVLQAVQKTDEGHPFKAYLELEITLSQEQIQKYTDCLQFYVNSTLKELRRLFLVQDLVDSLKFAVLMWLLTYVGALFNGLTLLLMAVVSMFTLPVVYVKHQAQIDQYLGLVRTHINAVVAKIQAKIPGAKRHAE

SEQ ID NO: 35091 - protein, 193 aa, Homo sapiens; identical to SEQ ID NO: 35087
  REGION 1..193: note = ENSP00000378525

SEQ ID NO: 35092 - protein, 208 aa, Homo sapiens; identical to SEQ ID NO: 35088
  REGION 1..208: note = ENSP00000340716

SEQ ID NO: 35093 - protein, 776 aa, Homo sapiens; identical to SEQ ID NO: 35089
  REGION 1..776: note = ENSP00000267484

SEQ ID NO: 35094 - protein, 702 aa, Homo sapiens; identical to SEQ ID NO: 35090
  REGION 1..702: note = ENSP00000483039

SEQ ID NO: 35095 - protein, 493 aa, Homo sapiens
  REGION 1..493: note = ENSP00000396872
  VARIANT 1: note = Any amino acid
XYRGWVGVSGRLHPSLTVWAQNLPFLRGSRLLAWVLWLQAWQVAAPCPGACVCYNEPKVTTSCPQQGLQAVPVGIPAASQRIFLHGNRISHVPAASFRACRNLTILWLHSNVLARIDAAAFTGLALLEQLDLSDNAQLRSVDPATFHGLGRLHTLHLDRCGLQELGPGLFRGLAALQYLYLQDNALQALPDDTFRDLGNLTHLFLHGNRISSVPERAFRGLHSLDRLLLHQNRVAHVHPHAFRDLGRLMTLYLFANNLSALPTEALAPLRALQYLRLNDNPWVCDCRARPLWAWLQKFRGSSSEVPCSLPQRLAGRDLKRLAANDLQGCAVATGPYHPIWTGRATDEEPLGLPKCCQPDAADKASVLEPGRPASAGNALKGRVPPGDSPPGNGSGPRHINDSPFGTLPGSAEPPLTAVRPEGSEPPGFPTSGPRRRPGCSRKNRTRSHCRLGQAGSGGGGTGDSEGSGALPSLTCSLTPLGLALVLWTVLGPC

SEQ ID NO: 35096 - protein, 473 aa, Homo sapiens
  REGION 1..473: note = ENSP00000043402
MKRASAGGSRLLAWVLWLQAWQVAAPCPGACVCYNEPKVTTSCPQQGLQAVPVGIPAASQRIFLHGNRISHVPAASFRACRNLTILWLHSNVLARIDAAAFTGLALLEQLDLSDNAQLRSVDPATFHGLGRLHTLHLDRCGLQELGPGLFRGLAALQYLYLQDNALQALPDDTFRDLGNLTHLFLHGNRISSVPERAFRGLHSLDRLLLHQNRVAHVHPHAFRDLGRLMTLYLFANNLSALPTEALAPLRALQYLRLNDNPWVCDCRARPLWAWLQKFRGSSSEVPCSLPQRLAGRDLKRLAANDLQGCAVATGPYHPIWTGRATDEEPLGLPKCCQPDAADKASVLEPGRPASAGNALKGRVPPGDSPPGNGSGPRHINDSPFGTLPGSAEPPLTAVRPEGSEPPGFPTSGPRRRPGCSRKNRTRSHCRLGQAGSGGGGTGDSEGSGALPSLTCSLTPLGLALVLWTVLGPC

SEQ ID NO: 35097 - protein, 559 aa, Homo sapiens
  REGION 1..559: note = ENSP00000403535
  VARIANT 1: note = Any amino acid
XVEEGAGCLGGCGTRLLLSPGHTCPPPPPSGIQAPVFEIDVPRGTPAPLQCFLGPVGGTPTGTPRGLLQCGLCVHWSPEEVPAVTSVHSRRPSRSRLLAWVLWLQAWQVAAPCPGACVCYNEPKVTTSCPQQGLQAVPVGIPAASQRIFLHGNRISHVPAASFRACRNLTILWLHSNVLARIDAAAFTGLALLEQLDLSDNAQLRSVDPATFHGLGRLHTLHLDRCGLQELGPGLFRGLAALQYLYLQDNALQALPDDTFRDLGNLTHLFLHGNRISSVPERAFRGLHSLDRLLLHQNRVAHVHPHAFRDLGRLMTLYLFANNLSALPTEALAPLRALQYLRLNDNPWVCDCRARPLWAWLQKFRGSSSEVPCSLPQRLAGRDLKRLAANDLQGCAVATGPYHPIWTGRATDEEPLGLPKCCQPDAADKASVLEPGRPASAGNALKGRVPPGDSPPGNGSGPRHINDSPFGTLPGSAEPPLTAVRPEGSEPPGFPTSGPRRRPGCSRKNRTRSHCRLGQAGSGGGGTGDSEGSGALPSLTCSLTPLGLALVLWTVLGPC

SEQ ID NO: 35098 - protein, 441 aa, Homo sapiens
  REGION 1..441: note = ENSP00000330631
MLRKGCCVELLLLLVAAELPLGGGCPRDCVCYPAPMTVSCQAHNFAAIPEGIPVDSERVFLQNNRIGLLQPGHFSPAMVTLWIYSNNITYIHPSTFEGFVHLEELDLGDNRQLRTLAPETFQGLVKLHALYLYKCGLSALPAGVFGGLHSLQYLYLQDNHIEYLQDDIFVDLVNLSHLFLHGNKLWSLGPGTFRGLVNLDRLLLHENQLQWVHHKAFHDLRRLTTLFLFNNSLSELQGECLAPLGALEFLRLNGNPWDCGCRARSLWEWLQRFRGSSSAVPCVSPGLRHGQDLKLLRAEDFRNCTGPASPHQIKSHTLTTTDRAARKEHHSPHGPTRSKGHPHGPRPGHRKPGKNCTNPRNRNQISKAGAGKQAPELPDYAPDYQHKFSFDIMPTARPKRKGKCARRTPIRAPSGVQQASSASSLGASLLAWTLGLAVTLR

SEQ ID NO: 35099 - protein, 420 aa, Homo sapiens
  REGION 1..420: note = ENSP00000335397
MLPGLRRLLQAPASACLLLMLLALPLAAPSCPMLCTCYSSPPTVSCQANNFSSVPLSLPPSTQRLFLQNNLIRTLRPGTFGSNLLTLWLFSNNLSTIYPGTFRHLQALEELDLGDNRHLRSLEPDTFQGLERLQSLHLYRCQLSSLPGNIFRGLVSLQYLYLQENSLLHLQDDLFADLANLSHLFLHGNRLRLLTEHVFRGLGSLDRLLLHGNRLQGVHRAAFRGLSRLTILYLFNNSLASLPGEALADLPSLEFLRLNANPWACDCRARPLWAWFQRARVSSSDVTCATPPERQGRDLRALREADFQACPPAAPTRPGSRARGNSSSNHLYGVAEAGAPPADPSTLYRDLPAEDSRGRQGGDAPTEDDYWGGYGGEDQRGEQMCPGAACQAPPDSRGPALSAGLPSPLLCLLLLVPHHL

SEQ ID NO: 35100 - protein, 204 aa, Homo sapiens
  REGION 1..204: note = ENSP00000435606
MLPGLRRLLQAPASACLLLMLLALPLAAPSCPMLCTCYSSPPTVSCQANNFSSVPLSLPPSTQRLFLQNNLIRTLRPGTFGSNLLTLWLFSNNLSTIYPGTFRHLQALEELDLGDNRHLRSLEPDTFQGLERLQSLHLYRCQLSSLPGNIFRGLVSLQYLYLQENSLLHLQGKKEKGKSLLCSWRMDALKMEGIPVIVIHCYYY

SEQ ID NO: 35101 - protein, 193 aa, Homo sapiens
  REGION 1..193: note = ENSP00000378552
MLPGLRRLLQAPASACLLLMLLALPLAAPSCPMLCTCYSSPPTVSCQANNFSSVPLSLPPSTQRLFLQNNLIRTLRPGTFGSNLLTLWLFSNNLSTIYPGTFRHLQALEELDLGDNRHLRSLEPDTFQGLERLQSLHLYRCQLSSLPGNIFRGLVSLQYLYLQENSLLHLQGPLPKGLCSCFSHPPSSLPTSR

SEQ ID NO: 35102 - protein, 662 aa, Homo sapiens
  REGION 1..662: note = ENSP00000374558
MVSQSTVRQDSPVEPWEGISDHSGIIDGSPRLLNTDHPPCQLDIRLMRHKAVWINPQDVQQQPQDLQSQVPAAGNSGTHFVTDAASPSGPSPSCLGDSLAETTLSEDTTDSVGSASPHGSSEKSSSFSLSSTEVHMVRPGYSHRVSLPTSPGILATSPYPETDSAFFEPSHLTSAADEGAVQVSRRTISSNSFSPEVFVLPVDVEKENAHFYVADMIISAMEKMKCNILSQQQTESWSKEVSGLLGSDQPDSEMTFDTNIKQESGSSTSSYSGYEGCAVLQVSPVTETRTYHDVKEICKCDVDEFVILELGDFNDITETCSCSCSSSKSVTYEPDFNSAELLAKELYRVFQKCWILSVVNSQLAGSLSAAGSIVVNEECVRKDFESSMNVVQEIKFKSRIRGTEDWAPPRFQIIFNIHPPLKRDLVVAAQNFFCAGCGTPVEPKFVKRLRYCEYLGKYFCDCCHSYAESCIPARILMMWDFKKYYVSNFSKQLLDSIWHQPIFNLLSIGQSLYAKAKELDRVKEIQEQLFHIKKLLKTCRFANSALKEFEQVPGHLTDELHLFSLEDLVRIKKGLLAPLLKDILKASLAHVAGCELCQGKGFICEFCQNTTVIFPFQTATCRRCSACRACFHKQCFQSSECPRCARITARRKLLESVASAAT

SEQ ID NO: 35103 - protein, 595 aa, Homo sapiens
  REGION 1..595: note = ENSP00000368061
MVSNHYFLLCVNLPLREIHTPGPSPSCLGDSLAETTLSEDTTDSVGSASPHGSSEKSSSFSLSSTEVHMVRPGYSHRVSLPTSPGILATSPYPETDSAFFEPSHLTSAADEGAVQVSRRTISSNSFSPEVFVLPVDVEKENAHFYVADMIISAMEKMKCNILSQQQTESWSKEVSGLLGSDQPDSEMTFDTNIKQESGSSTSSYSGYEGCAVLQVSPVTETRTYHDVKEICKCDVDEFVILELGDFNDITETCSCSCSSSKSVTYEPDFNSAELLAKELYRVFQKCWILSVVNSQLAGSLSAAGSIVVNEECVRKDFESSMNVVQEIKFKSRIRGTEDWAPPRFQIIFNIHPPLKRDLVVAAQNFFCAGCGTPVEPKFVKRLRYCEYLGKYFCDCCHSYAESCIPARILMMWDFKKYYVSNFSKQLLDSIWHQPIFNLLSIGQSLYAKAKELDRVKEIQEQLFHIKKLLKTCRFANSALKEFEQVPGHLTDELHLFSLEDLVRIKKGLLAPLLKDILKASLAHVAGCELCQGKGFICEFCQNTTVIFPFQTATCRRCSACRACFHKQCFQSSECPRCARITARRKLLESVASAAT

SEQ ID NO: 35104 - protein, 287 aa, Homo sapiens
  REGION 1..287: note = ENSP00000412507
MVSQSTVRQDSPVEPWEGISDHSGIIDGSPRLLNTDHPPCQLDIRLMRHKAVWINPQDVQQQPQDLQSQVPAAGNSGTHFVTDAASPSGPSPSCLGDSLAETTLSEDTTDSVGSASPHGSSEKSSSFSLSSTEVHMVRPGYSHRVSLPTSPGILATSPYPETDSAFFEPSHLTSAADEGAVQVSRRTISSNSFSPEVFVLPVDVEKENAHFYVADMIISAMEKMKCNILSQQQTESWSKEVSGLLGSDQPDSEMTFDTNIKQESGSSTSSYSGYEGKLCCVTGQPSD

SEQ ID NO: 35105 - protein, 635 aa, Homo sapiens
  REGION 1..635: note = ENSP00000368064
MVSQSTVRQDSPVEPWEGISDHSGIIDGSPRLLNTDHPPCQLDIRLMRHKAVWINPQDVQQQPQDLQSQVPAAGNSGTHFVTDAASPSGPSPSCLGDSLAETTLSEDTTDSVGSASPHGSSEKSSSFSLSSTEVHMVRPGYSHRVSLPTSPGILATSPYPETDSAFFEPSHLTSAADEGAVQVSRRTISSNSFSPEVFVLPVDVEKENAHFYVADMIISAMEKMKCNILSQQQTESWSKEVSGLLGSDQPDSEMTFDTNIKQESGSSTSSYSGYEGCAVLQVSPVTETRTYHDVKEICKCDVDEFVILELGDFNDITETCSCSCSSSKSVTYEPDFNSAELLAKELYRVFQKCWILSVVNSQLAGSLSAAGSIVVNEECVRKDFESSMNVVQEIKFKSRIRGTEDWAPPRFQIIFNIHPPLKRDLVVAAQNFFCAGCGTPVEPKFVKRLRYCEYLGKYFCDCCHSYAESCIPARILMMWDFKKYYVSNFSKQLLDSIWHQPIFNLLSIGQSLYAKAKELDRVKEIQEQLFHIKKLLKTCRFANSCVKERALFVNFARIRLSSSHFRQQHVEDVQRAGLAFTNSASSPPSAPGVRGSQRGENFWKVWPLQQHDAPEYCEKDCSTCLMITPICVYYW

SEQ ID NO: 35106 - protein, 505 aa, Homo sapiens
  REGION 1..505: note = ENSP00000386578
MVSNHYFLLCVNLPLREIHTPGAVQVSRRTISSNSFSPEVFVLPVDVEKENAHFYVADMIISAMEKMKCNILSQQQTESWSKEVSGLLGSDQPDSEMTFDTNIKQESGSSTSSYSGYEGCAVLQVSPVTETRTYHDVKEICKCDVDEFVILELGDFNDITETCSCSCSSSKSVTYEPDFNSAELLAKELYRVFQKCWILSVVNSQLAGSLSAAGSIVVNEECVRKDFESSMNVVQEIKFKSRIRGTEDWAPPRFQIIFNIHPPLKRDLVVAAQNFFCAGCGTPVEPKFVKRLRYCEYLGKYFCDCCHSYAESCIPARILMMWDFKKYYVSNFSKQLLDSIWHQPIFNLLSIGQSLYAKAKELDRVKEIQEQLFHIKKLLKTCRFANSALKEFEQVPGHLTDELHLFSLEDLVRIKKGLLAPLLKDILKASLAHVAGCELCQGKGFICEFCQNTTVIFPFQTATCRRCSACRACFHKQCFQSSECPRCARITARRKLLESVASAAT

SEQ ID NO: 35107 - protein, 527 aa, Homo sapiens
  REGION 1..527: note = ENSP00000485932
MVRPGYSHRVSLPTSPGILATSPYPETDSAFFEPSHLTSAADEGAVQVSRRTISSNSFSPEVFVLPVDVEKENAHFYVADMIISAMEKMKCNILSQQQTESWSKEVSGLLGSDQPDSEMTFDTNIKQESGSSTSSYSGYEGCAVLQVSPVTETRTYHDVKEICKCDVDEFVILELGDFNDITETCSCSCSSSKSVTYEPDFNSAELLAKELYRVFQKCWILSVVNSQLAGSLSAAGSIVVNEECVRKDFESSMNVVQEIKFKSRIRGTEDWAPPRFQIIFNIHPPLKRDLVVAAQNFFCAGCGTPVEPKFVKRLRYCEYLGKYFCDCCHSYAESCIPARILMMWDFKKYYVSNFSKQLLDSIWHQPIFNLLSIGQSLYAKAKELDRVKEIQEQLFHIKKLLKTCRFANSALKEFEQVPGHLTDELHLFSLEDLVRIKKGLLAPLLKDILKASLAHVAGCELCQGKGFICEFCQNTTVIFPFQTATCRRCSACRACFHKQCFQSSECPRCARITARRKLLESVASAAT

SEQ ID NO: 35108 - protein, 129 aa, Homo sapiens
  REGION 1..129: note = ENSP00000402357
MVRPGYSHRVSLPTSPGILATSPYPETDSAFFEPSHLTSAADEGAVQVSRRTISSNSFSPEVFVLPVDVEKENAHFYVADMIISAMEKMKCNILSQQQTESWSKEVSGLLGSDQPDSEMTFDTNIKQES

SEQ ID NO: 35109 - protein, 178 aa, Homo sapiens
  REGION 1..178: note = ENSP00000414579
MVSQSTVRQDSPVEPWEGISDHSGIIDGSPRLLNTDHPPCQLDIRLMRHKAVWINPQDVQQQPQDLQSQVPAAGNSGTHFVTDAASPSGPSPSCLGDSLAETTLSEDTTDSVGSASPHGSSEKSSSFSLSSTEVHMVRPGYSHRVSLPTSPGILATSPYPETDSAFFEPSHLTSAADE

SEQ ID NO: 35110 - protein, 447 aa, Homo sapiens
  REGION 1..447: note = ENSP00000368074
MIISAMEKMKCNILSQQQTESWSKEVSGLLGSDQPDSEMTFDTNIKQESGSSTSSYSGYEGCAVLQVSPVTETRTYHDVKEICKCDVDEFVILELGDFNDITETCSCSCSSSKSVTYEPDFNSAELLAKELYRVFQKCWILSVVNSQLAGSLSAAGSIVVNEECVRKDFESSMNVVQEIKFKSRIRGTEDWAPPRFQIIFNIHPPLKRDLVVAAQNFFCAGCGTPVEPKFVKRLRYCEYLGKYFCDCCHSYAESCIPARILMMWDFKKYYVSNFSKQLLDSIWHQPIFNLLSIGQSLYAKAKELDRVKEIQEQLFHIKKLLKTCRFANSALKEFEQVPGHLTDELHLFSLEDLVRIKKGLLAPLLKDILKASLAHVAGCELCQGKGFICEFCQNTTVIFPFQTATCRRCSACRACFHKQCFQSSECPRCARITARRKLLESVASAAT

SEQ ID NO: 35111 - protein, 505 aa, Homo sapiens; identical to SEQ ID NO: 35106
  REGION 1..505: note = ENSP00000368057

SEQ ID NO: 35112 - protein, 662 aa, Homo sapiens; identical to SEQ ID NO: 35102
  REGION 1..662: note = ENSP00000396935

SEQ ID NO: 35113 - protein, 604 aa, Homo sapiens
  REGION 1..604: note = ENSP00000428543
MISVKRNTWRALSLVIGDCRKKGNFEYCQDRTEKHSTMPDSPVDVKTQSRLTPPTMPPPPTTQGAPRTSSFTPTTLTNGTSHSPTALNGAPSPPNGFSNGPSSSSSSSLANQQLPPACGARQLSKLKRFLTTLQQFGNDISPEIGERVRTLVLGLVNSTLTIEEFHSKLQEATNFPLRPFVIPFLKANLPLLQRELLHCARLAKQNPAQYLAQHEQLLLDASTTSPVDSSELLLDVNENGKRRTPDRTKENGFDREPLHSEHPSKRPCTISPGQRYSPNNGLSYQPNGLPHPTPPPPQHYRLDDMAIAHHYRDSYRHPSHRDLRDRNRPMGLHGTRQEEMIDHRLTDREWAEEWKHLDHLLNCIMDMVEKTRRSLTVLRRCQEADREELNYWIRRYSDAEDLKKGGGSSSSHSRQQSPVNPDPVALDAHREFLHRPASGYVPEEIWKKAEEAVNEVKRQAMTELQKAVSEAERKAHDMITTERAKMERTVAEAKRQAAEDALAVINQQEDSSESCWNCGRKASETCSGCNTARYCGSFCQHKDWEKHHHICGQTLQAQQQGDTPAVSSSVTPNSGAGSPMDTPPAATPRSTTPGTPSTIETTPR

SEQ ID NO: 35114 - protein, 577 aa, Homo sapiens
  REGION 1..577: note = ENSP00000379520
MPDRTEKHSTMPDSPVDVKTQSRLTPPTMPPPPTTQGAPRTSSFTPTTLTNGTSHSPTALNGAPSPPNGFSNGPSSSSSSSLANQQLPPACGARQLSKLKRFLTTLQQFGNDISPEIGERVRTLVLGLVNSTLTIEEFHSKLQEATNFPLRPFVIPFLKANLPLLQRELLHCARLAKQNPAQYLAQHEQLLLDASTTSPVDSSELLLDVNENGKRRTPDRTKENGFDREPLHSEHPSKRPCTISPGQRYSPNNGLSYQPNGLPHPTPPPPQHYRLDDMAIAHHYRDSYRHPSHRDLRDRNRPMGLHGTRQEEMIDHRLTDREWAEEWKHLDHLLNCIMDMVEKTRRSLTVLRRCQEADREELNYWIRRYSDAEDLKKGGGSSSSHSRQQSPVNPDPVALDAHREFLHRPASGYVPEEIWKKAEEAVNEVKRQAMTELQKAVSEAERKAHDMITTERAKMERTVAEAKRQAAEDALAVINQQEDSSESCWNCGRKASETCSGCNTARYCGSFCQHKDWEKHHHICGQTLQAQQQGDTPAVSSSVTPNSGAGSPMDTPPAATPRSTTPGTPSTIETTPR

SEQ ID NO: 35115 - protein, 567 aa, Homo sapiens
  REGION 1..567: note = ENSP00000353504
MPDSPVDVKTQSRLTPPTMPPPPTTQGAPRTSSFTPTTLTNGTSHSPTALNGAPSPPNGFSNGPSSSSSSSLANQQLPPACGARQLSKLKRFLTTLQQFGNDISPEIGERVRTLVLGLVNSTLTIEEFHSKLQEATNFPLRPFVIPFLKANLPLLQRELLHCARLAKQNPAQYLAQHEQLLLDASTTSPVDSSELLLDVNENGKRRTPDRTKENGFDREPLHSEHPSKRPCTISPGQRYSPNNGLSYQPNGLPHPTPPPPQHYRLDDMAIAHHYRDSYRHPSHRDLRDRNRPMGLHGTRQEEMIDHRLTDREWAEEWKHLDHLLNCIMDMVEKTRRSLTVLRRCQEADREELNYWIRRYSDAEDLKKGGGSSSSHSRQQSPVNPDPVALDAHREFLHRPASGYVPEEIWKKAEEAVNEVKRQAMTELQKAVSEAERKAHDMITTERAKMERTVAEAKRQAAEDALAVINQQEDSSESCWNCGRKASETCSGCNTARYCGSFCQHKDWEKHHHICGQTLQAQQQGDTPAVSSSVTPNSGAGSPMDTPPAATPRSTTPGTPSTIETTPR

SEQ ID NO: 35116 - protein, 567 aa, Homo sapiens; identical to SEQ ID NO: 35115
  REGION 1..567: note = ENSP00000390137

SEQ ID NO: 35117 - protein, 615 aa, Homo sapiens
  REGION 1..615: note = ENSP00000428742
MCHPDKAFTSDKLQCVFNEYKAAVWVPPRPRPLSRAPLPEDRTEKHSTMPDSPVDVKTQSRLTPPTMPPPPTTQGAPRTSSFTPTTLTNGTSHSPTALNGAPSPPNGFSNGPSSSSSSSLANQQLPPACGARQLSKLKRFLTTLQQFGNDISPEIGERVRTLVLGLVNSTLTIEEFHSKLQEATNFPLRPFVIPFLKANLPLLQRELLHCARLAKQNPAQYLAQHEQLLLDASTTSPVDSSELLLDVNENGKRRTPDRTKENGFDREPLHSEHPSKRPCTISPGQRYSPNNGLSYQPNGLPHPTPPPPQHYRLDDMAIAHHYRDSYRHPSHRDLRDRNRPMGLHGTRQEEMIDHRLTDREWAEEWKHLDHLLNCIMDMVEKTRRSLTVLRRCQEADREELNYWIRRYSDAEDLKKGGGSSSSHSRQQSPVNPDPVALDAHREFLHRPASGYVPEEIWKKAEEAVNEVKRQAMTELQKAVSEAERKAHDMITTERAKMERTVAEAKRQAAEDALAVINQQEDSSESCWNCGRKASETCSGCNTARYCGSFCQHKDWEKHHHICGQTLQAQQQGDTPAVSSSVTPNSGAGSPMDTPPAATPRSTTPGTPSTIETTPR

SEQ ID NO: 35118 - protein, 577 aa, Homo sapiens; identical to SEQ ID NO: 35114
  REGION 1..577: note = ENSP00000430728

SEQ ID NO: 35119 - protein, 127 aa, Homo sapiens
  REGION 1..127: note = ENSP00000430778
  VARIANT 1: note = Any amino acid
XLDDMAIAHHYRDSYRHPSHRDLRDRNRPMGLHGTRQEEMIDHRLTDREWAEEWKHLDHLLNCIMDMVEKTRRSLTVLRRCQEADREELNYWIRRYSDAEDLKKGGGSSSSHSRQQSPVNPDPVALG

SEQ ID NO: 35120 - protein, 30 aa, Homo sapiens
  REGION 1..30: note = ENSP00000429085
  VARIANT 1: note = Any amino acid
XLLRAASRCERKREEANSRQMNKLRSREVK

SEQ ID NO: 35121 - protein, 31 aa, Homo sapiens
  REGION 1..31: note = ENSP00000430863
ASRCERKREEANSRQLFSHQLFPSISYLNVL

SEQ ID NO: 35122 - protein, 210 aa, Homo sapiens
  REGION 1..210: note = ENSP00000429728
MPDSPVDVKTQSRLTPPTMPPPPTTQGAPRTSSFTPTTLTNGTSHSPTALNGAPSPPNGFSNGPSSSSSSSLANQQLPPACGARQLSKLKRFLTTLQQFGNDISPEIGERVRTLVLGLVNSTLTIEEFHSKLQEATNFPLRPFVIPFLKANLPLLQRELLHCARLAKQNPAQYLAQHEQLLLDASTTSPVDSSELLLDVNENGKRRTPDR

SEQ ID NO: 35123 - protein, 229 aa, Homo sapiens
  REGION 1..229: note = ENSP00000431094
MISVKRNTWRALSLVIGDCRKKGNFEYCQDRTEKHSTMPDSPVDVKTQSRLTPPTMPPPPTTQGAPRTSSFTPTTLTNGTSHSPTALNGAPSPPNGFSNGPSSSSSSSLANQQLPPACGARQLSKLKRFLTTLQQFGNDISPEIGERVRTLVLGLVNSTLTIEEFHSKLQEATNFPLRPFVIPFLKANLPLLQRELLHCARLAKQNPAQYLAQHEQLLLDASTTSPVDS

SEQ ID NO: 35124 - protein, 171 aa, Homo sapiens
  REGION 1..171: note = ENSP00000427763
MPDSPVDVKTQSRLTPPTMPPPPTTQGAPRTSSFTPTTLTNGTSHSPTALNGAPSPPNGFSNGPSSSSSSSLANQQLPPACGARQLSKLKRFLTTLQQFGNDISPEIGERVRTLVLGLVNSTLTIEEFHSKLQEATNFPLRPFVIPFLKANLPLLQRELLHCARLAKQNPA

SEQ ID NO: 35125 - protein, 169 aa, Homo sapiens
  REGION 1..169: note = ENSP00000430204
MISVKRNTWRALSLVIGDCRKKGNFEYCQDRTEKHSTMPDSPVDVKTQSRLTPPTMPPPPTTQGAPRTSSFTPTTLTNGTSHSPTALNGAPSPPNGFSNGPSSSSSSSLANQQLPPACGARQLSKLKRFLTTLQQFGNDISPEIGERVRTLVLGLVNSTLTIEEFHSKL

SEQ ID NO: 35126 - protein, 120 aa, Homo sapiens
  REGION 1..120: note = ENSP00000429940
MPDSPVDVKTQSRLTPPTMPPPPTTQGAPRTSSFTPTTLTNGTSHSPTALNGAPSPPNGFSNGPSSSSSSSLANQQLPPACGARQLSKLKRFLTTLQQFGNDISPEIGERVRTLVLGLVN

SEQ ID NO: 35127 - protein, 156 aa, Homo sapiens
  REGION 1..156: note = ENSP00000429532
MISVKRNTWRALSLVIGDCRKKGNFEYCQDRTEKHSTMPDSPVDVKTQSRLTPPTMPPPPTTQGAPRTSSFTPTTLTNGTSHSPTALNGAPSPPNGFSNGPSSSSSSSLANQQLPPACGARQLSKLKRFLTTLQQFGNDISPEIGERVRTLVLGLV

SEQ ID NO: 35128 - protein, 135 aa, Homo sapiens
  REGION 1..135: note = ENSP00000429506
MISVKRNTWRALSLVIGDCRKKGNFEYCQDRTEKHSTMPDSPVDVKTQSRLTPPTMPPPPTTQGAPRTSSFTPTTLTNGTSHSPTALNGAPSPPNGFSNGPSSSSSSSLANQQLPPACGARQLSKLKRFLTTLQQ

SEQ ID NO: 35129 - protein, 101 aa, Homo sapiens
  REGION 1..101: note = ENSP00000430637
MPDRTEKHSTMPDSPVDVKTQSRLTPPTMPPPPTTQGAPRTSSFTPTTLTNGTSHSPTALNGAPSPPNGFSNGPSSSSSSSLANQQLPPACGARQLSKLKR

SEQ ID NO: 35130 - protein, 91 aa, Homo sapiens
  REGION 1..91: note = ENSP00000428100
MPDSPVDVKTQSRLTPPTMPPPPTTQGAPRTSSFTPTTLTNGTSHSPTALNGAPSPPNGFSNGPSSSSSSSLANQQLPPACGARQLSKLKR

SEQ ID NO: 35131 - protein, 88 aa, Homo sapiens
  REGION 1..88: note = ENSP00000429137
MPDSPVDVKTQSRLTPPTMPPPPTTQGAPRTSSFTPTTLTNGTSHSPTALNGAPSPPNGFSNGPSSSSSSSLANQQLPPACGARQLSK

SEQ ID NO: 35132 - protein, 120 aa, Homo sapiens
  REGION 1..120: note = ENSP00000430070
MISVKRNTWRALSLVIGDCRKKGNFEYCQDRTEKHSTMPDSPVDVKTQSRLTPPTMPPPPTTQGAPRTSSFTPTTLTNGTSHSPTALNGAPSPPNGFSNGPSSSSSSSLANQQLPPACGA

SEQ ID NO: 35133 - protein, 119 aa, Homo sapiens
  REGION 1..119: note = ENSP00000429118
MISVKRNTWRALSLVIGDCRKKGNFEYCQDRTEKHSTMPDSPVDVKTQSRLTPPTMPPPPTTQGAPRTSSFTPTTLTNGTSHSPTALNGAPSPPNGFSNGPSSSSSSSLANQQLPPACG

SEQ ID NO: 35134 - protein, 36 aa, Homo sapiens
  REGION 1..36: note = ENSP00000430084
MISVKRNTWRALSLVIGDCRKKGNFEYCQDKPHLKN

SEQ ID NO: 35135 - protein, 79 aa, Homo sapiens
  REGION 1..79: note = ENSP00000428475
MPDRTEKHSTMPDSPVDVKTQSRLTPPTMPPPPTTQGAPRTSSFTPTTLTNGTSHSPTALNGAPSPPNGFSNGPSSSSS

SEQ ID NO: 35136 - protein, 36 aa, Homo sapiens; identical to SEQ ID NO: 35134
  REGION 1..36: note = ENSP00000429653

SEQ ID NO: 35137 - protein, 69 aa, Homo sapiens
  REGION 1..69: note = ENSP00000429062
MPDRTEKHSTMPDSPVDVKTQSRLTPPTMPPPPTTQGAPRTSSFTPTTLTNGTSHSPTALNGAPSPPNG

SEQ ID NO: 35138 - protein, 93 aa, Homo sapiens
  REGION 1..93: note = ENSP00000429666
MISVKRNTWRALSLVIGDCRKKGNFEYCQDRTEKHSTMPDSPVDVKTQSRLTPPTMPPPPTTQGAPRTSSFTPTTLTNGTSHSPTALNGAPSP

SEQ ID NO: 35139 - protein, 36 aa, Homo sapiens; identical to SEQ ID NO: 35134
  REGION 1..36: note = ENSP00000429587

SEQ ID NO: 35140 - protein, 68 aa, Homo sapiens
  REGION 1..68: note = ENSP00000429034
MISVKRNTWRALSLVIGDCRKKGNFEYCQGARAQHPASGDAAPAPLMALLSAATHSRTGGMSPERACF

SEQ ID NO: 35141 - protein, 85 aa, Homo sapiens
  REGION 1..85: note = ENSP00000429375
MISVKRNTWRALSLVIGDCRKKGNFEYCQDRTEKHSTMPDSPVDVKTQSRLTPPTMPPPPTTQGAPRTSSFTPTTLTNGTSHSPT

SEQ ID NO: 35142 - protein, 46 aa, Homo sapiens
  REGION 1..46: note = ENSP00000429864
MPDSPVDVKTQSRLTPPTMPPPPTTQGAPRTSSFTPTTLTNGTSHS

SEQ ID NO: 35143 - protein, 54 aa, Homo sapiens
  REGION 1..54: note = ENSP00000430080
MISVKRNTWRALSLVIGDCRKKGNFEYCQDRTEKHSTMPDSPVDVKTQSRLTPP

SEQ ID NO: 35144 - protein, 26 aa, Homo sapiens
  REGION 1..26: note = ENSP00000430334
MPDRTEKHSTMPDSPVDVKTQSRLTP

SEQ ID NO: 35145 - protein, 48 aa, Homo sapiens
  REGION 1..48: note = ENSP00000429857
MISVKRNTWRALSLVIGDCRKKGNFEYCQDRTEKHSTMPDSPVDVKTQ

SEQ ID NO: 35146 - protein, 58 aa, Homo sapiens
  REGION 1..58: note = ENSP00000428133
MISVKRNTWRALSLVIGDCRKKGNFEYCQGARAQHPASGDAAPAPLMALLSAATHSRT

SEQ ID NO: 35147 - protein, 577 aa, Homo sapiens; identical to SEQ ID NO: 35114
  REGION 1..577: note = ENSP00000478331

SEQ ID NO: 35148 - protein, 604 aa, Homo sapiens; identical to SEQ ID NO: 35113
  REGION 1..604: note = ENSP00000481112

SEQ ID NO: 35149 - protein, 604 aa, Homo sapiens; identical to SEQ ID NO: 35113
  REGION 1..604: note = ENSP00000481799

SEQ ID NO: 35150 - protein, 584 aa, Homo sapiens
  REGION 1..584: note = ENSP00000480500
MVGLSGPVQYRTEKHSTMPDSPVDVKTQSRLTPPTMPPPPTTQGAPRTSSFTPTTLTNGTSHSPTALNGAPSPPNGFSNGPSSSSSSSLANQQLPPACGARQLSKLKRFLTTLQQFGNDISPEIGERVRTLVLGLVNSTLTIEEFHSKLQEATNFPLRPFVIPFLKANLPLLQRELLHCARLAKQNPAQYLAQHEQLLLDASTTSPVDSSELLLDVNENGKRRTPDRTKENGFDREPLHSEHPSKRPCTISPGQRYSPNNGLSYQPNGLPHPTPPPPQHYRLDDMAIAHHYRDSYRHPSHRDLRDRNRPMGLHGTRQEEMIDHRLTDREWAEEWKHLDHLLNCIMDMVEKTRRSLTVLRRCQEADREELNYWIRRYSDAEDLKKGGGSSSSHSRQQSPVNPDPVALDAHREFLHRPASGYVPEEIWKKAEEAVNEVKRQAMTELQKAVSEAERKAHDMITTERAKMERTVAEAKRQAAEDALAVINQQEDSSESCWNCGRKASETCSGCNTARYCGSFCQHKDWEKHHHICGQTLQAQQQGDTPAVSSSVTPNSGAGSPMDTPPAATPRSTTPGTPSTIETTPR

SEQ ID NO: 35151 - protein, 663 aa, Homo sapiens
  REGION 1..663: note = ENSP00000402257
MCHPDKAFTSDKLQCVFNEYKAAVWVPPRPRPLSRAPLPEAGGENLHLKISRVRKRNLPFVVWGEEEASTPGLDAISHHLCYPDRTHRDRTEKHSTMPDSPVDVKTQSRLTPPTMPPPPTTQGAPRTSSFTPTTLTNGTSHSPTALNGAPSPPNGFSNGPSSSSSSSLANQQLPPACGARQLSKLKRFLTTLQQFGNDISPEIGERVRTLVLGLVNSTLTIEEFHSKLQEATNFPLRPFVIPFLKANLPLLQRELLHCARLAKQNPAQYLAQHEQLLLDASTTSPVDSSELLLDVNENGKRRTPDRTKENGFDREPLHSEHPSKRPCTISPGQRYSPNNGLSYQPNGLPHPTPPPPQHYRLDDMAIAHHYRDSYRHPSHRDLRDRNRPMGLHGTRQEEMIDHRLTDREWAEEWKHLDHLLNCIMDMVEKTRRSLTVLRRCQEADREELNYWIRRYSDAEDLKKGGGSSSSHSRQQSPVNPDPVALDAHREFLHRPASGYVPEEIWKKAEEAVNEVKRQAMTELQKAVSEAERKAHDMITTERAKMERTVAEAKRQAAEDALAVINQQEDSSESCWNCGRKASETCSGCNTARYCGSFCQHKDWEKHHHICGQTLQAQQQGDTPAVSSSVTPNSGAGSPMDTPPAATPRSTTPGTPSTIETTPR

SEQ ID NO: 35152 - protein, 604 aa, Homo sapiens; identical to SEQ ID NO: 35113
  REGION 1..604: note = ENSP00000481315

SEQ ID NO: 35153 - protein, 604 aa, Homo sapiens; identical to SEQ ID NO: 35113
  REGION 1..604: note = ENSP00000265814

SEQ ID NO: 35154 - protein, 463 aa, Homo sapiens
  REGION 1..463: note = ENSP00000473172
MATVTATTKVPEIRDVTRIERIGAHSHIRGLGLDDALEPRQASQGMVGQLAARRAAGVVLEMIREGKIAGRAVLIAGQPGTGKTAIAMGMAQALGPDTPFTAIAGSEIFSLEMSKTEALTQAFRRSIGVRIKEETEIIEGEVVEIQIDRPATGTGSKVGKLTLKTTEMETIYDLGTKMIESLTKDKVQAGDVITIDKATGKISKLGRSFTRARDYDAMGSQTKFVQCPDGELQKRKEVVHTVSLHEIDVINSRTQGFLALFSGDTGEIKSEVREQINAKVAEWREEGKAEIIPGVLFIDEVHMLDIESFSFLNRALESDMAPVLIMATNRGITRIRGTSYQSPHGIPIDLLDRLLIVSTTPYSEKDTKQILRIRCEEEDVEMSEDAYTVLTRIGLETSLRYAIQLITAASLVCRKRKGTEVQVDDIKRVYSLFLDESRSTQYMKEYQDAFLFNELKGETMDTS

SEQ ID NO: 35155 - protein, 354 aa, Homo sapiens
  REGION 1..354: note = ENSP00000471524
MVGQLAARRAAGVVLEMIREGKIAGRAVLIAGQPGTGKTAIAMGMAQALGPDTPFTAIAGSEIFSLEMSKTEALTQAFRRSIGVRIKEETEIIEGEVVEIQIDRPATGTGSKVGKLTLKTTEMETIYDLGTKMIESLTKDKVQAGDVITIDKATGKISKLGRSFTRARDYDAMGSQTKFVQCPDGELQKRKEVVHTVSLHEIDVINSRTQGFLALFSGDTGEIKSEVREQINAKVAEWREEGKAEIIPGVLFIDEVHMLDIESFSFLNRALESDMAPVLIMATNRGITRIRGTSYQSPHGIPIDLLDRLLIVSTTPYSEKDTKQILRIRVQKCRWMTSSGSTHSSWTSPAPRST

SEQ ID NO: 35156 - protein, 109 aa, Homo sapiens
  REGION 1..109: note = ENSP00000469189
MVGQLAARRAAGVVLEMIREGKIAGRAVLIAGQPGTGKTAIAMGMAQALGPDTPFTAIAGSEIFSLEMSKTEALTQAFRRSIGVRIKEETEIIEGEVVEIQIDRPATGT

SEQ ID NO: 35157 - protein, 44 aa, Homo sapiens
  REGION 1..44: note = ENSP00000469760
MATVELQLSKSSWRNGRFRSPWRQCVMRRVVGPCASSHLGALDC

SEQ ID NO: 35158 - protein, 50 aa, Homo sapiens
  REGION 1..50: note = ENSP00000471538
MATVTATTKVPEIRDVTRIERIGAHSHIRGLGLDDALEPRQLPDVVEMPW

SEQ ID NO: 35159 - protein, 259 aa, Homo sapiens
  REGION 1..259: note = ENSP00000221413
MATVTATTKVPEIRDVTRIERIGAHSHIRGLGLDDALEPRQASQGMVGQLAARRAAGVVLEMIREGKIAGRAVLIAGQPGTGKTAIAMGMAQALGPDTPFTAIAGSEIFSLEMSKTEALTQAFRRSIGVRIKEETEIIEGEVVEIQIDRPATGTGSKVGKLTLKTTEMETIYDLGTKMIESLTKDKGRDHHRQGDGQDLQAGPLLHTRPRLRRYGLPDQVRAVPRWGAPETQGGGAHRVPARDRRHQLSHPGLPGALLR

SEQ ID NO: 35160 - protein, 39 aa, Homo sapiens
  REGION 1..39: note = ENSP00000469488
MATVTATTKVPEIRDVTRIERIEMEFPRVSQDGLDLLTS

SEQ ID NO: 35161 - protein, 354 aa, Homo sapiens; identical to SEQ ID NO: 35155
  REGION 1..354: note = ENSP00000486242

SEQ ID NO: 35162 - protein, 50 aa, Homo sapiens
  REGION 1..50: note = ENSP00000492610
LHPQTATTKVPEIRDVTRIERIGAHSHIRGLGLDDALEPRQLPDVVEMPW

SEQ ID NO: 35163 - protein, 39 aa, Homo sapiens
  REGION 1..39: note = ENSP00000492564
LHPQTATTKVPEIRDVTRIERIEMEFPRVSQDGLDLLTS

SEQ ID NO: 35164 - protein, 676 aa, Homo sapiens
  REGION 1..676: note = ENSP00000423306
MTSQYPFEAETPECLVGSVPVQCLCQGLELDCDETNLRAVPSVSSNVTAMSLQWNLIRKLPPDCFKNYHDLQKLYLQNNKITSISIYAFRGLNSLTKLYLSHNRITFLKPGVFEDLHRLEWLIIEDNHLSRISPPTFYGLNSLILLVLMNNVLTRLPDKPLCQHMPRLHWLDLEGNHIHNLRNLTFISCSNLTVLVMRKNKINHLNENTFAPLQKLDELDLGSNKIENLPPLIFKDLKELSQLNLSYNPIQKIQANQFDYLVKLKSLSLEGIEISNIQQRMFRPLMNLSHIYFKKFQYCGYAPHVRSCKPNTDGISSLENLLASIIQRVFVWVVSAVTCFGNIFVICMRPYIRSENKLYAMSIISLCCADCLMGIYLFVIGGFDLKFRGEYNKHAQLWMESTHCQLVGSLAILSTEVSVLLLTFLTLEKYICIVYPFRCVRPGKCRTITVLILIWITGFIVAFIPLSNKEFFKNYYGTNGVCFPLHSEDTESIGAQIYSVAIFLGINLAAFIIIVFSYGSMFYSVHQSAITATEIRNQVKKEMILAKRFFFIVFTDALCWIPIFVVKFLSLLQVEIPGTITSWVVIFILPINSALNPILYTLTTRPFKEMIHRFWYNYRQRKSMDSKGQKTYAPSFIWVEMWPLQEMPPELMKPDLFTYPCEMSLISQSTRLNSYS

SEQ ID NO: 35165 - protein, 757 aa, Homo sapiens
  REGION 1..757: note = ENSP00000303248
MTSGSVFFYILIFGKYFSHGGGQDVKCSLGYFPCGNITKCLPQLLHCNGVDDCGNQADEDNCGDNNGWSLQFDKYFASYYKMTSQYPFEAETPECLVGSVPVQCLCQGLELDCDETNLRAVPSVSSNVTAMSLQWNLIRKLPPDCFKNYHDLQKLYLQNNKITSISIYAFRGLNSLTKLYLSHNRITFLKPGVFEDLHRLEWLIIEDNHLSRISPPTFYGLNSLILLVLMNNVLTRLPDKPLCQHMPRLHWLDLEGNHIHNLRNLTFISCSNLTVLVMRKNKINHLNENTFAPLQKLDELDLGSNKIENLPPLIFKDLKELSQLNLSYNPIQKIQANQFDYLVKLKSLSLEGIEISNIQQRMFRPLMNLSHIYFKKFQYCGYAPHVRSCKPNTDGISSLENLLASIIQRVFVWVVSAVTCFGNIFVICMRPYIRSENKLYAMSIISLCCADCLMGIYLFVIGGFDLKFRGEYNKHAQLWMESTHCQLVGSLAILSTEVSVLLLTFLTLEKYICIVYPFRCVRPGKCRTITVLILIWITGFIVAFIPLSNKEFFKNYYGTNGVCFPLHSEDTESIGAQIYSVAIFLGINLAAFIIIVFSYGSMFYSVHQSAITATEIRNQVKKEMILAKRFFFIVFTDALCWIPIFVVKFLSLLQVEIPGTITSWVVIFILPINSALNPILYTLTTRPFKEMIHRFWYNYRQRKSMDSKGQKTYAPSFIWVEMWPLQEMPPELMKPDLFTYPCEMSLISQSTRLNSYS

SEQ ID NO: 35166 - protein, 157 aa, Homo sapiens
  REGION 1..157: note = ENSP00000432036
MTSGSVFFYILIFGKYFSHGGGQDVKCSLGYFPCGNITKCLPQLLHCNGVDDCGNQADEDNCGDNNGWSLQFDKYFASYYKMTSQYPFEAETPECLVGSVPVQCLCQGLELDCDETNLRAVPSVSSNVTAMSLQWNLIRKLPPDCFKNYHDLQKLTL

SEQ ID NO: 35167 - protein, 189 aa, Homo sapiens
  REGION 1..189: note = ENSP00000434475
MTSGSVFFYILIFGKYFSHGGGQDVKCSLGYFPCGNITKCLPQLLHCNGVDDCGNQADEDNCGDNNGWSLQFDKYFASYYKMTSQYPFEAETPECLVGSVPVQCLCQGLELDCDETNLRAVPSVSSNVTAMSLQWNLIRKLPPDCFKNYHDLQKLYLQNNKITSISIYAFRGLNSLTKLSRAVKDGSEK

SEQ ID NO: 35168 - protein, 709 aa, Homo sapiens
  REGION 1..709: note = ENSP00000345889
MTSGSVFFYILIFGKYFSHGGGQDVKCSLGYFPCGNITKCLPQLLHCNGVDDCGNQADEDNCGDNNGWSLQFDKYFASYYKMTSQYPFEAETPECLVGSVPVQCLCQGLELDCDETNLRAVPSVSSNVTAMSLQWNLIRKLPPDCFKNYHDLQKLYLQNNKITSISIYAFRGLNSLTKLYLSHNRITFLKPGVFEDLHRLEWLIIEDNHLSRISPPTFYGLNSLILLVLMNNVLTRLPDKPLCQHMPRLHWLDLEGNHIHNLRNLTFISCSNLTVLVMRKNKINHLNENTFAPLQKLDEFSLEGIEISNIQQRMFRPLMNLSHIYFKKFQYCGYAPHVRSCKPNTDGISSLENLLASIIQRVFVWVVSAVTCFGNIFVICMRPYIRSENKLYAMSIISLCCADCLMGIYLFVIGGFDLKFRGEYNKHAQLWMESTHCQLVGSLAILSTEVSVLLLTFLTLEKYICIVYPFRCVRPGKCRTITVLILIWITGFIVAFIPLSNKEFFKNYYGTNGVCFPLHSEDTESIGAQIYSVAIFLGINLAAFIIIVFSYGSMFYSVHQSAITATEIRNQVKKEMILAKRFFFIVFTDALCWIPIFVVKFLSLLQVEIPGTITSWVVIFILPINSALNPILYTLTTRPFKEMIHRFWYNYRQRKSMDSKGQKTYAPSFIWVEMWPLQEMPPELMKPDLFTYPCEMSLISQSTRLNSYS

SEQ ID NO: 35169 - protein, 724 aa, Homo sapiens
  REGION 1..724: note = ENSP00000420712
MTSGSVFFYILIFGKYFSHGGGQDVKCSLGYFPCGNITKCLPQLLHCNGVDDCGNQADEDNCVVGSVPVQCLCQGLELDCDETNLRAVPSVSSNVTAMSLQWNLIRKLPPDCFKNYHDLQKLYLQNNKITSISIYAFRGLNSLTKLYLSHNRITFLKPGVFEDLHRLEWLIIEDNHLSRISPPTFYGLNSLILLVLMNNVLTRLPDKPLCQHMPRLHWLDLEGNHIHNLRNLTFISCSNLTVLVMRKNKINHLNENTFAPLQKLDELDLGSNKIENLPPLIFKDLKELSQLNLSYNPIQKIQANQFDYLVKLKSLSLEGIEISNIQQRMFRPLMNLSHIYFKKFQYCGYAPHVRSCKPNTDGISSLENLLASIIQRVFVWVVSAVTCFGNIFVICMRPYIRSENKLYAMSIISLCCADCLMGIYLFVIGGFDLKFRGEYNKHAQLWMESTHCQLVGSLAILSTEVSVLLLTFLTLEKYICIVYPFRCVRPGKCRTITVLILIWITGFIVAFIPLSNKEFFKNYYGTNGVCFPLHSEDTESIGAQIYSVAIFLGINLAAFIIIVFSYGSMFYSVHQSAITATEIRNQVKKEMILAKRFFFIVFTDALCWIPIFVVKFLSLLQVEIPGTITSWVVIFILPINSALNPILYTLTTRPFKEMIHRFWYNYRQRKSMDSKGQKTYAPSFIWVEMWPLQEMPPELMKPDLFTYPCEMSLISQSTRLNSYS

SEQ ID NO: 35170 - protein, 626 aa, Homo sapiens
  REGION 1..626: note = ENSP00000480522
MSLQWNLIRKLPPDCFKNYHDLQKLYLQNNKITSISIYAFRGLNSLTKLYLSHNRITFLKPGVFEDLHRLEWLIIEDNHLSRISPPTFYGLNSLILLVLMNNVLTRLPDKPLCQHMPRLHWLDLEGNHIHNLRNLTFISCSNLTVLVMRKNKINHLNENTFAPLQKLDELDLGSNKIENLPPLIFKDLKELSQLNLSYNPIQKIQANQFDYLVKLKSLLEGIEISNIQQRMFRPLMNLSHIYFKKFQYCGYAPHVRSCKPNTDGISSLENLLASIIQRVFVWVVSAVTCFGNIFVICMRPYIRSENKLYAMSIISLCCADCLMGIYLFVIGGFDLKFRGEYNKHAQLWMESTHCQLVGSLAILSTEVSVLLLTFLTLEKYICIVYPFRCVRPGKCRTITVLILIWITGFIVAFIPLSNKEFFKNYYGTNGVCFPLHSEDTESIGAQIYSVAIFLGINLAAFIIIVFSYGSMFYSVHQSAITATEIRNQVKKEMILAKRFFFIVFTDALCWIPIFVVKFLSLLQVEIPGTITSWVVIFILPINSALNPILYTLTTRPFKEMIHRFWYNYRQRKSMDSKGQKTYAPSFIWVEMWPLQEMPPELMKPDLFTYPCEMSLISQSTRLNSYS

SEQ ID NO: 35171 - protein, 784 aa, Homo sapiens
  REGION 1..784: note = ENSP00000405841
MTSGSVFFYILIFGKYFSHGGGQDVKCSLGYFPCGNITKCLPQLLHCNGVDDCGNQADEDNCGDNNGWSLQFDKYFASYYKMTSQYPFEAETPECSFHFFLFITLLFLVPHCHHALPLPLDSVVGSVPVQCLCQGLELDCDETNLRAVPSVSSNVTAMSLQWNLIRKLPPDCFKNYHDLQKLYLQNNKITSISIYAFRGLNSLTKLYLSHNRITFLKPGVFEDLHRLEWLIIEDNHLSRISPPTFYGLNSLILLVLMNNVLTRLPDKPLCQHMPRLHWLDLEGNHIHNLRNLTFISCSNLTVLVMRKNKINHLNENTFAPLQKLDELDLGSNKIENLPPLIFKDLKELSQLNLSYNPIQKIQANQFDYLVKLKSLSLEGIEISNIQQRMFRPLMNLSHIYFKKFQYCGYAPHVRSCKPNTDGISSLENLLASIIQRVFVWVVSAVTCFGNIFVICMRPYIRSENKLYAMSIISLCCADCLMGIYLFVIGGFDLKFRGEYNKHAQLWMESTHCQLVGSLAILSTEVSVLLLTFLTLEKYICIVYPFRCVRPGKCRTITVLILIWITGFIVAFIPLSNKEFFKNYYGTNGVCFPLHSEDTESIGAQIYSVAIFLGINLAAFIIIVFSYGSMFYSVHQSAITATEIRNQVKKEMILAKRFFFIVFTDALCWIPIFVVKFLSLLQVEIPGTITSWVVIFILPINSALNPILYTLTTRPFKEMIHRFWYNYRQRKSMDSKGQKTYAPSFIWVEMWPLQEMPPELMKPDLFTYPCEMSLISQSTRLNSYS

SEQ ID NO: 35172 - protein, 601 aa, Homo sapiens
  REGION 1..601: note = ENSP00000414885
MVTCTQNMKAALKSLLYHSRNLGYLQNNKITSISIYAFRGLNSLTKLYLSHNRITFLKPGVFEDLHRLEWLIIEDNHLSRISPPTFYGLNSLILLVLMNNVLTRLPDKPLCQHMPRLHWLVMRKNKINHLNENTFAPLQKLDELDLGSNKIENLPPLIFKDLKELSQLNLSYNPIQKIQANQFDYLVKLKSLSLEGIEISNIQQRMFRPLMNLSHIYFKKFQYCGYAPHVRSCKPNTDGISSLENLLASIIQRVFVWVVSAVTCFGNIFVICMRPYIRSENKLYAMSIISLCCADCLMGIYLFVIGGFDLKFRGEYNKHAQLWMESTHCQLVGSLAILSTEVSVLLLTFLTLEKYICIVYPFRCVRPGKCRTITVLILIWITGFIVAFIPLSNKEFFKNYYGTNGVCFPLHSEDTESIGAQIYSVAIFLGINLAAFIIIVFSYGSMFYSVHQSAITATEIRNQVKKEMILAKRFFFIVFTDALCWIPIFVVKFLSLLQVEIPGTITSWVVIFILPINSALNPILYTLTTRPFKEMIHRFWYNYRQRKSMDSKGQKTYAPSFIWVEMWPLQEMPPELMKPDLFTYPCEMSLISQSTRLNSYS

SEQ ID NO: 35173 - protein, 5033 aa, Homo sapiens
  REGION 1..5033: note = ENSP00000347667
MGDAEGEDEVQFLRTDDEVVLQCSATVLKEQLKLCLAAEGFGNRLCFLEPTSNAQNVPPDLAICCFVLEQSLSVRALQEMLANTVEAGVESSQGGGHRTLLYGHAILLRHAHSRMYLSCLTTSRSMTDKLAFDVGLQEDATGEACWWTMHPASKQRSEGEKVRVGDDIILVSVSSERYLHLSTASGELQVDASFMQTLWNMNPICSRCEEGFVTGGHVLRLFHGHMDECLTISPADSDDQRRLVYYEGGAVCTHARSLWRLEPLRISWSGSHLRWGQPLRVRHVTTGQYLALTEDQGLVVVDASKAHTKATSFCFRISKEKLDVAPKRDVEGMGPPEIKYGESLCFVQHVASGLWLTYAAPDPKALRLGVLKKKAMLHQEGHMDDALSLTRCQQEESQAARMIHSTNGLYNQFIKSLDSFSGKPRGSGPPAGTALPIEGVILSLQDLIIYFEPPSEDLQHEEKQSKLRSLRNRQSLFQEEGMLSMVLNCIDRLNVYTTAAHFAEFAGEEAAESWKEIVNLLYELLASLIRGNRSNCALFSTNLDWLVSKLDRLEASSGILEVLYCVLIESPEVLNIIQENHIKSIISLLDKHGRNHKVLDVLCSLCVCNGVAVRSNQDLITENLLPGRELLLQTNLINYVTSIRPNIFVGRAEGTTQYSKWYFEVMVDEVTPFLTAQATHLRVGWALTEGYTPYPGAGEGWGGNGVGDDLYSYGFDGLHLWTGHVARPVTSPGQHLLAPEDVISCCLDLSVPSISFRINGCPVQGVFESFNLDGLFFPVVSFSAGVKVRFLLGGRHGEFKFLPPPGYAPCHEAVLPRERLHLEPIKEYRREGPRGPHLVGPSRCLSHTDFVPCPVDTVQIVLPPHLERIREKLAENIHELWALTRIEQGWTYGPVRDDNKRLHPCLVDFHSLPEPERNYNLQMSGETLKTLLALGCHVGMADEKAEDNLKKTKLPKTYMMSNGYKPAPLDLSHVRLTPAQTTLVDRLAENGHNVWARDRVGQGWSYSAVQDIPARRNPRLVPYRLLDEATKRSNRDSLCQAVRTLLGYGYNIEPPDQEPSQVENQSRCDRVRIFRAEKSYTVQSGRWYFEFEAVTTGEMRVGWARPELRPDVELGADELAYVFNGHRGQRWHLGSEPFGRPWQPGDVVGCMIDLTENTIIFTLNGEVLMSDSGSETAFREIEIGDGFLPVCSLGPGQVGHLNLGQDVSSLRFFAICGLQEGFEPFAINMQRPVTTWFSKGLPQFEPVPLEHPHYEVSRVDGTVDTPPCLRLTHRTWGSQNSLVEMLFLRLSLPVQFHQHFRCTAGATPLAPPGLQPPAEDEARAAEPDPDYENLRRSAGGWSEAENGKEGTAKEGAPGGTPQAGGEAQPARAENEKDATTEKNKKRGFLFKAKKVAMMTQPPATPTLPRLPHDVVPADNRDDPEIILNTTTYYYSVRVFAGQEPSCVWAGWVTPDYHQHDMSFDLSKVRVVTVTMGDEQGNVHSSLKCSNCYMVWGGDFVSPGQQGRISHTDLVIGCLVDLATGLMTFTANGKESNTFFQVEPNTKLFPAVFVLPTHQNVIQFELGKQKNIMPLSAAMFQSERKNPAPQCPPRLEMQMLMPVSWSRMPNHFLQVETRRAGERLGWAVQCQEPLTMMALHIPEENRCMDILELSERLDLQRFHSHTLRLYRAVCALGNNRVAHALCSHVDQAQLLHALEDAHLPGPLRAGYYDLLISIHLESACRSRRSMLSEYIVPLTPETRAITLFPPGRSTENGHPRHGLPGVGVTTSLRPPHHFSPPCFVAALPAAGAAEAPARLSPAIPLEALRDKALRMLGEAVRDGGQHARDPVGGSVEFQFVPVLKLVSTLLVMGIFGDEDVKQILKMIEPEVFTEEEEEEDEEEEGEEEDEEEKEEDEEETAQEKEDEEKEEEEAAEGEKEEGLEEGLLQMKLPESVKLQMCHLLEYFCDQELQHRVESLAAFAERYVDKLQANQRSRYGLLIKAFSMTAAETARRTREFRSPPQEQINMLLQFKDGTDEEDCPLPEEIRQDLLDFHQDLLAHCGIQLDGEEEEPEEETTLGSRLMSLLEKVRLVKKKEEKPEEERSAEESKPRSLQELVSHMVVRWAQEDFVQSPELVRAMFSLLHRQYDGLGELLRALPRAYTISPSSVEDTMSLLECLGQIRSLLIVQMGPQEENLMIQSIGNIMNNKVFYQHPNLMRALGMHETVMEVMVNVLGGGESKEIRFPKMVTSCCRFLCYFCRISRQNQRSMFDHLSYLLENSGIGLGMQGSTPLDVAAASVIDNNELALALQEQDLEKVVSYLAGCGLQSCPMLVAKGYPDIGWNPCGGERYLDFLRFAVFVNGESVEENANVVVRLLIRKPECFGPALRGEGGSGLLAAIEEAIRISEDPARDGPGIRRDRRREHFGEEPPEENRVHLGHAIMSFYAALIDLLGRCAPEMHLIQAGKGEALRIRAILRSLVPLEDLVGIISLPLQIPTLGKDGALVQPKMSASFVPDHKASMVLFLDRVYGIENQDFLLHVLDVGFLPDMRAAASLDTATFSTTEMALALNRYLCLAVLPLITKCAPLFAGTEHRAIMVDSMLHTVYRLSRGRSLTKAQRDVIEDCLMSLCRYIRPSMLQHLLRRLVFDVPILNEFAKMPLKLLTNHYERCWKYYCLPTGWANFGVTSEEELHLTRKLFWGIFDSLAHKKYDPELYRMAMPCLCAIAGALPPDYVDASYSSKAEKKATVDAEGNFDPRPVETLNVIIPEKLDSFINKFAEYTHEKWAFDKIQNNWSYGENIDEELKTHPMLRPYKTFSEKDKEIYRWPIKESLKAMIAWEWTIEKAREGEEEKTEKKKTRKISQSAQTYDPREGYNPQPPDLSAVTLSRELQAMAEQLAENYHNTWGRKKKQELEAKGGGTHPLLVPYDTLTAKEKARDREKAQELLKFLQMNGYAVTRGLKDMELDSSSIEKRFAFGFLQQLLRWMDISQEFIAHLEAVVSSGRVEKSPHEQEIKFFAKILLPLINQYFTNHCLYFLSTPAKVLGSGGHASNKEKEMITSLFCKLAALVRHRVSLFGTDAPAVVNCLHILARSLDARTVMKSGPEIVKAGLRSFFESASEDIEKMVENLRLGKVSQARTQVKGVGQNLTYTTVALLPVLTTLFQHIAQHQFGDDVILDDVQVSCYRTLCSIYSLGTTKNTYVEKLRPALGECLARLAAAMPVAFLEPQLNEYNACSVYTTKSPRERAILGLPNSVEEMCPDIPVLERLMADIGGLAESGARYTEMPHVIEITLPMLCSYLPRWWERGPEAPPSALPAGAPPPCTAVTSDHLNSLLGNILRIIVNNLGIDEASWMKRLAVFAQPIVSRARPELLQSHFIPTIGRLRKRAGKVVSEEEQLRLEAKAEAQEGELLVRDEFSVLCRDLYALYPLLIRYVDNNRAQWLTEPNPSAEELFRMVGEIFIYWSKSHNFKREEQNFVVQNEINNMSFLTADNKSKMAKSGGSDQERTKKKRRGDRYSVQTSLIVATLKKMLPIGLNMCAPTDQDLITLAKTRYALKDTDEEVREFLHNNLHLQGKVEGSPSLRWQMALYRGVPGREEDADDPEKIVRRVQEVSAVLYYLDQTEHPYKSKKAVWHKLLSKQRRRAVVACFRMTPLYNLPTHRACNMFLESYKAAWILTEDHSFEDRMIDDLSKAGEQEEEEEEVEEKKPDPLHQLVLHFSRTALTEKSKLDEDYLYMAYADIMAKSCHLEEGGENGEAEEEVEVSFEEKQMEKQRLLYQQARLHTRGAAEMVLQMISACKGETGAMVSSTLKLGISILNGGNAEVQQKMLDYLKDKKEVGFFQSIQALMQTCSVLDLNAFERQNKAEGLGMVNEDGTVINRQNGEKVMADDEFTQDLFRFLQLLCEGHNNDFQNYLRTQTGNTTTINIIICTVDYLLRLQESISDFYWYYSGKDVIEEQGKRNFSKAMSVAKQVFNSLTEYIQGPCTGNQQSLAHSRLWDAVVGFLHVFAHMMMKLAQDSSQIELLKELLDLQKDMVVMLLSLLEGNVVNGMIARQMVDMLVESSSNVEMILKFFDMFLKLKDIVGSEAFQDYVTDPRGLISKKDFQKAMDSQKQFSGPEIQFLLSCSEADENEMINCEEFANRFQEPARDIGFNVAVLLTNLSEHVPHDPRLHNFLELAESILEYFRPYLGRIEIMGASRRIERIYFEISETNRAQWEMPQVKESKRQFIFDVVNEGGEAEKMELFVSFCEDTIFEMQIAAQISEPEGEPETDEDEGAGAAEAGAEGAEEGAAGLEGTAATAAAGATARVVAAAGRALRGLSYRSLRRRVRRLRRLTAREAATAVAALLWAAVTRAGAAGAGAAAGALGLLWGSLFGGGLVEGAKKVTVTELLAGMPDPTSDEVHGEQPAGPGGDADGEGASEGAGDAAEGAGDEEEAVHEAGPGGADGAVAVTDGGPFRPEGAGGLGDMGDTTPAEPPTPEGSPILKRKLGVDGVEEELPPEPEPEPEPELEPEKADAENGEKEEVPEPTPEPPKKQAPPSPPPKKEEAGGEFWGELEVQRVKFLNYLSRNFYTLRFLALFLAFAINFILLFYKVSDSPPGEDDMEGSAAGDVSGAGSGGSSGWGLGAGEEAEGDEDENMVYYFLEESTGYMEPALRCLSLLHTLVAFLCIIGYNCLKVPLVIFKREKELARKLEFDGLYITEQPEDDDVKGQWDRLVLNTPSFPSNYWDKFVKRKVLDKHGDIYGRERIAELLGMDLATLEITAHNERKPNPPPGLLTWLMSIDVKYQIWKFGVIFTDNSFLYLGWYMVMSLLGHYNNFFFAAHLLDIAMGVKTLRTILSSVTHNGKQLVMTVGLLAVVVYLYTVVAFNFFRKFYNKSEDEDEPDMKCDDMMTCYLFHMYVGVRAGGGIGDEIEDPAGDEYELYRVVFDITFFFFVIVILLAIIQGLIIDAFGELRDQQEQVKEDMETKCFICGIGSDYFDTTPHGFETHTLEEHNLANYMFFLMYLINKDETEHTGQESYVWKMYQERCWDFFPAGDCFRKQYEDQLS

SEQ ID NO: 35174 - protein, 5038 aa, Homo sapiens
  REGION 1..5038: note = ENSP00000352608
MGDAEGEDEVQFLRTDDEVVLQCSATVLKEQLKLCLAAEGFGNRLCFLEPTSNAQNVPPDLAICCFVLEQSLSVRALQEMLANTVEAGVESSQGGGHRTLLYGHAILLRHAHSRMYLSCLTTSRSMTDKLAFDVGLQEDATGEACWWTMHPASKQRSEGEKVRVGDDIILVSVSSERYLHLSTASGELQVDASFMQTLWNMNPICSRCEEGFVTGGHVLRLFHGHMDECLTISPADSDDQRRLVYYEGGAVCTHARSLWRLEPLRISWSGSHLRWGQPLRVRHVTTGQYLALTEDQGLVVVDASKAHTKATSFCFRISKEKLDVAPKRDVEGMGPPEIKYGESLCFVQHVASGLWLTYAAPDPKALRLGVLKKKAMLHQEGHMDDALSLTRCQQEESQAARMIHSTNGLYNQFIKSLDSFSGKPRGSGPPAGTALPIEGVILSLQDLIIYFEPPSEDLQHEEKQSKLRSLRNRQSLFQEEGMLSMVLNCIDRLNVYTTAAHFAEFAGEEAAESWKEIVNLLYELLASLIRGNRSNCALFSTNLDWLVSKLDRLEASSGILEVLYCVLIESPEVLNIIQENHIKSIISLLDKHGRNHKVLDVLCSLCVCNGVAVRSNQDLITENLLPGRELLLQTNLINYVTSIRPNIFVGRAEGTTQYSKWYFEVMVDEVTPFLTAQATHLRVGWALTEGYTPYPGAGEGWGGNGVGDDLYSYGFDGLHLWTGHVARPVTSPGQHLLAPEDVISCCLDLSVPSISFRINGCPVQGVFESFNLDGLFFPVVSFSAGVKVRFLLGGRHGEFKFLPPPGYAPCHEAVLPRERLHLEPIKEYRREGPRGPHLVGPSRCLSHTDFVPCPVDTVQIVLPPHLERIREKLAENIHELWALTRIEQGWTYGPVRDDNKRLHPCLVDFHSLPEPERNYNLQMSGETLKTLLALGCHVGMADEKAEDNLKKTKLPKTYMMSNGYKPAPLDLSHVRLTPAQTTLVDRLAENGHNVWARDRVGQGWSYSAVQDIPARRNPRLVPYRLLDEATKRSNRDSLCQAVRTLLGYGYNIEPPDQEPSQVENQSRCDRVRIFRAEKSYTVQSGRWYFEFEAVTTGEMRVGWARPELRPDVELGADELAYVFNGHRGQRWHLGSEPFGRPWQPGDVVGCMIDLTENTIIFTLNGEVLMSDSGSETAFREIEIGDGFLPVCSLGPGQVGHLNLGQDVSSLRFFAICGLQEGFEPFAINMQRPVTTWFSKGLPQFEPVPLEHPHYEVSRVDGTVDTPPCLRLTHRTWGSQNSLVEMLFLRLSLPVQFHQHFRCTAGATPLAPPGLQPPAEDEARAAEPDPDYENLRRSAGGWSEAENGKEGTAKEGAPGGTPQAGGEAQPARAENEKDATTEKNKKRGFLFKAKKVAMMTQPPATPTLPRLPHDVVPADNRDDPEIILNTTTYYYSVRVFAGQEPSCVWAGWVTPDYHQHDMSFDLSKVRVVTVTMGDEQGNVHSSLKCSNCYMVWGGDFVSPGQQGRISHTDLVIGCLVDLATGLMTFTANGKESNTFFQVEPNTKLFPAVFVLPTHQNVIQFELGKQKNIMPLSAAMFQSERKNPAPQCPPRLEMQMLMPVSWSRMPNHFLQVETRRAGERLGWAVQCQEPLTMMALHIPEENRCMDILELSERLDLQRFHSHTLRLYRAVCALGNNRVAHALCSHVDQAQLLHALEDAHLPGPLRAGYYDLLISIHLESACRSRRSMLSEYIVPLTPETRAITLFPPGRSTENGHPRHGLPGVGVTTSLRPPHHFSPPCFVAALPAAGAAEAPARLSPAIPLEALRDKALRMLGEAVRDGGQHARDPVGGSVEFQFVPVLKLVSTLLVMGIFGDEDVKQILKMIEPEVFTEEEEEEDEEEEGEEEDEEEKEEDEEETAQEKEDEEKEEEEAAEGEKEEGLEEGLLQMKLPESVKLQMCHLLEYFCDQELQHRVESLAAFAERYVDKLQANQRSRYGLLIKAFSMTAAETARRTREFRSPPQEQINMLLQFKDGTDEEDCPLPEEIRQDLLDFHQDLLAHCGIQLDGEEEEPEEETTLGSRLMSLLEKVRLVKKKEEKPEEERSAEESKPRSLQELVSHMVVRWAQEDFVQSPELVRAMFSLLHRQYDGLGELLRALPRAYTISPSSVEDTMSLLECLGQIRSLLIVQMGPQEENLMIQSIGNIMNNKVFYQHPNLMRALGMHETVMEVMVNVLGGGESKEIRFPKMVTSCCRFLCYFCRISRQNQRSMFDHLSYLLENSGIGLGMQGSTPLDVAAASVIDNNELALALQEQDLEKVVSYLAGCGLQSCPMLVAKGYPDIGWNPCGGERYLDFLRFAVFVNGESVEENANVVVRLLIRKPECFGPALRGEGGSGLLAAIEEAIRISEDPARDGPGIRRDRRREHFGEEPPEENRVHLGHAIMSFYAALIDLLGRCAPEMHLIQAGKGEALRIRAILRSLVPLEDLVGIISLPLQIPTLGKDGALVQPKMSASFVPDHKASMVLFLDRVYGIENQDFLLHVLDVGFLPDMRAAASLDTATFSTTEMALALNRYLCLAVLPLITKCAPLFAGTEHRAIMVDSMLHTVYRLSRGRSLTKAQRDVIEDCLMSLCRYIRPSMLQHLLRRLVFDVPILNEFAKMPLKLLTNHYERCWKYYCLPTGWANFGVTSEEELHLTRKLFWGIFDSLAHKKYDPELYRMAMPCLCAIAGALPPDYVDASYSSKAEKKATVDAEGNFDPRPVETLNVIIPEKLDSFINKFAEYTHEKWAFDKIQNNWSYGENIDEELKTHPMLRPYKTFSEKDKEIYRWPIKESLKAMIAWEWTIEKAREGEEEKTEKKKTRKISQSAQTYDPREGYNPQPPDLSAVTLSRELQAMAEQLAENYHNTWGRKKKQELEAKGGGTHPLLVPYDTLTAKEKARDREKAQELLKFLQMNGYAVTRGLKDMELDSSSIEKRFAFGFLQQLLRWMDISQEFIAHLEAVVSSGRVEKSPHEQEIKFFAKILLPLINQYFTNHCLYFLSTPAKVLGSGGHASNKEKEMITSLFCKLAALVRHRVSLFGTDAPAVVNCLHILARSLDARTVMKSGPEIVKAGLRSFFESASEDIEKMVENLRLGKVSQARTQVKGVGQNLTYTTVALLPVLTTLFQHIAQHQFGDDVILDDVQVSCYRTLCSIYSLGTTKNTYVEKLRPALGECLARLAAAMPVAFLEPQLNEYNACSVYTTKSPRERAILGLPNSVEEMCPDIPVLERLMADIGGLAESGARYTEMPHVIEITLPMLCSYLPRWWERGPEAPPSALPAGAPPPCTAVTSDHLNSLLGNILRIIVNNLGIDEASWMKRLAVFAQPIVSRARPELLQSHFIPTIGRLRKRAGKVVSEEEQLRLEAKAEAQEGELLVRDEFSVLCRDLYALYPLLIRYVDNNRAQWLTEPNPSAEELFRMVGEIFIYWSKSHNFKREEQNFVVQNEINNMSFLTADNKSKMAKAGDIQSGGSDQERTKKKRRGDRYSVQTSLIVATLKKMLPIGLNMCAPTDQDLITLAKTRYALKDTDEEVREFLHNNLHLQGKVEGSPSLRWQMALYRGVPGREEDADDPEKIVRRVQEVSAVLYYLDQTEHPYKSKKAVWHKLLSKQRRRAVVACFRMTPLYNLPTHRACNMFLESYKAAWILTEDHSFEDRMIDDLSKAGEQEEEEEEVEEKKPDPLHQLVLHFSRTALTEKSKLDEDYLYMAYADIMAKSCHLEEGGENGEAEEEVEVSFEEKQMEKQRLLYQQARLHTRGAAEMVLQMISACKGETGAMVSSTLKLGISILNGGNAEVQQKMLDYLKDKKEVGFFQSIQALMQTCSVLDLNAFERQNKAEGLGMVNEDGTVINRQNGEKVMADDEFTQDLFRFLQLLCEGHNNDFQNYLRTQTGNTTTINIIICTVDYLLRLQESISDFYWYYSGKDVIEEQGKRNFSKAMSVAKQVFNSLTEYIQGPCTGNQQSLAHSRLWDAVVGFLHVFAHMMMKLAQDSSQIELLKELLDLQKDMVVMLLSLLEGNVVNGMIARQMVDMLVESSSNVEMILKFFDMFLKLKDIVGSEAFQDYVTDPRGLISKKDFQKAMDSQKQFSGPEIQFLLSCSEADENEMINCEEFANRFQEPARDIGFNVAVLLTNLSEHVPHDPRLHNFLELAESILEYFRPYLGRIEIMGASRRIERIYFEISETNRAQWEMPQVKESKRQFIFDVVNEGGEAEKMELFVSFCEDTIFEMQIAAQISEPEGEPETDEDEGAGAAEAGAEGAEEGAAGLEGTAATAAAGATARVVAAAGRALRGLSYRSLRRRVRRLRRLTAREAATAVAALLWAAVTRAGAAGAGAAAGALGLLWGSLFGGGLVEGAKKVTVTELLAGMPDPTSDEVHGEQPAGPGGDADGEGASEGAGDAAEGAGDEEEAVHEAGPGGADGAVAVTDGGPFRPEGAGGLGDMGDTTPAEPPTPEGSPILKRKLGVDGVEEELPPEPEPEPEPELEPEKADAENGEKEEVPEPTPEPPKKQAPPSPPPKKEEAGGEFWGELEVQRVKFLNYLSRNFYTLRFLALFLAFAINFILLFYKVSDSPPGEDDMEGSAAGDVSGAGSGGSSGWGLGAGEEAEGDEDENMVYYFLEESTGYMEPALRCLSLLHTLVAFLCIIGYNCLKVPLVIFKREKELARKLEFDGLYITEQPEDDDVKGQWDRLVLNTPSFPSNYWDKFVKRKVLDKHGDIYGRERIAELLGMDLATLEITAHNERKPNPPPGLLTWLMSIDVKYQIWKFGVIFTDNSFLYLGWYMVMSLLGHYNNFFFAAHLLDIAMGVKTLRTILSSVTHNGKQLVMTVGLLAVVVYLYTVVAFNFFRKFYNKSEDEDEPDMKCDDMMTCYLFHMYVGVRAGGGIGDEIEDPAGDEYELYRVVFDITFFFFVIVILLAIIQGLIIDAFGELRDQQEQVKEDMETKCFICGIGSDYFDTTPHGFETHTLEEHNLANYMFFLMYLINKDETEHTGQESYVWKMYQERCWDFFPAGDCFRKQYEDQLS

SEQ ID NO: 35175 - protein, 886 aa, Homo sapiens
  REGION 1..886: note = ENSP00000470927
  VARIANT 1: note = Any amino acid
XNIMNNKVFYQHPNLMRALGMHETVMEVMVNVLGGGESKEIRFPKMVTSCCRFLCYFCRISRQNQRSMFDHLSYLLENSGIGLGMQGSTPLDVAAASVIDNNELALALQEQDLEKVVSYLAGCGLQSCPMLVAKGYPDIGWNPCGGERYLDFLRFAVFVNGESVEENANVVVRLLIRKPECFGPALRGEGGSGLLAAIEEAIRISEDPARDGPGIRRDRRREHFGEEPPEENRVHLGHAIMSFYAALIDLLGRCAPEMHLIQAGKGEALRIRAILRSLVPLEDLVGIISLPLQIPTLGKDGALVQPKMSASFVPDHKASMVLFLDRVYGIENQDFLLHVLDVGFLPDMRAAASLDTATFSTTEMALALNRYLCLAVLPLITKCAPLFAGTEHRAIMVDSMLHTVYRLSRGRSLTKAQRDVIEDCLMSLCRYIRPSMLQHLLRRLVFDVPILNEFAKMPLKLLTNHYERCWKYYCLPTGWANFGVTSEEELHLTRKLFWGIFDSLAHKKYDPELYRMAMPCLCAIAGALPPDYVDASYSSKAEKKATVDAEGNFDPRPVETLNVIIPEKLDSFINKFAEYTHEKWAFDKIQNNWSYGENIDEELKTHPMLRPYKTFSEKDKEIYRWPIKESLKAMIAWEWTIEKAREGEEEKTEKKKTRKISQSAQTYDPREGYNPQPPDLSAVTLSRELQAMAEQLAENYHNTWGRKKKQELEAKGGGTHPLLVPYDTLTAKEKARDREKAQELLKFLQMNGYAVTRGLKDMELDSSSIEKRFAFGFLQQLLRWMDISQEFIAHLEAVVSSGRVEKSPHEQEIKFFAKILLPLINQYFTNHCLYFLSTPAKVLGSGGHASNKEKEMITRDRRPSCGQLSSHPGPLPGCQDSDEVRP

SEQ ID NO: 35176 - protein, 733 aa, Homo sapiens
  REGION 1..733: note = ENSP00000471601
  VARIANT 1: note = Any amino acid
XTCCSRPPPSLSLWTVMKSGPEIVKAGLRSFFESASEDIEKMVENLRLGKVSQARTQVKGVGQNLTYTTVALLPVLTTLFQHIAQHQFGDDVILDDVQVSCYRTLCSIYSLGTTKNTYVEKLRPALGECLARLAAAMPVAFLEPQLNEYNACSVYTTKSPRERAILGLPNSVEEMCPDIPVLERLMADIGGLAESGARYTEMPHVIEITLPMLCSYLPRWWERGPEAPPSALPAGAPPPCTAVTSDHLNSLLGNILRIIVNNLGIDEASWMKRLAVFAQPIVSRARPELLQSHFIPTIGRLRKRAGKVVSEEEQLRLEAKAEAQEGELLVRDEFSVLCRDLYALYPLLIRYVDNNRAQWLTEPNPSAEELFRMVGEIFIYWSKSHNFKREEQNFVVQNEINNMSFLTADNKSKMAKAGDIQSGGSDQERTKKKRRGDRYSVQTSLIVATLKKMLPIGLNMCAPTDQDLITLAKTRYALKDTDEEVREFLHNNLHLQGKVEGSPSLRWQMALYRGVPGREEDADDPEKIVRRVQEVSAVLYYLDQTEHPYKSKKAVWHKLLSKQRRRAVVACFRMTPLYNLPTHRACNMFLESYKAAWILTEDHSFEDRMIDDLSKAGEQEEEEEEVEEKKPDPLHQLVLHFSRTALTEKSKLDEDYLYMAYADIMAKSCHLEEGGENGEAEEEVEVSFEEKQMEKQRLLYQQARLHTRGAAEMVLQMISACKGETGAMVSSTL

SEQ ID NO: 35177 - protein, 287 aa, Homo sapiens
  REGION 1..287: note = ENSP00000472497
RGPGSVGPGLGWKLRSGGGVRTLTLLVETRFSFCRTEHPYKSKKAVWHKLLSKQRRRAVVACFRMTPLYNLPTHRACNMFLESYKAAWILTEDHSFEDRMIDDLSKAGEQEEEEEEVEEKKPDPLHQLVLHFSRTALTEKSKLDEDYLYMAYADIMAKSCHLEEGGENGEAEEEVEVSFEEKQMEKQRLLYQQARLHTRGAAEMVLQMISACKGETGAMVSSTLKLGISILNGGNAEVQQKMLDYLKDKKEVGFFQSIQALMQTCSVLDLNAFERQNKAEGLGMVNE

SEQ ID NO: 35178 - protein, 171 aa, Homo sapiens
  REGION 1..171: note = ENSP00000470848
EKQRLLYQQARLHTRGAAEMVLQMISACKGETGAMVSSTLKLGISILNGGNAEVQQKMLDYLKDKKEVGFFQSIQALMQTCSVLDLNAFERQNKAEGLGMVNEDGTGEKVMADDEFTQDLFRFLQLLCEGHNNGALQWLPKFYTRGGFLYFRSRKDLREKTAWHLKINLLE

SEQ ID NO: 35179 - protein, 79 aa, Homo sapiens
  REGION 1..79: note = ENSP00000471404
  VARIANT 1: note = Any amino acid
XRLHTRGAAEMVLQMISACKGETGAMVSSTLKLGISILNGGNAEVQQKMLDYLKDKKEVGFFQSIQALMQTCRREGHGG

SEQ ID NO: 35180 - protein, 144 aa, Homo sapiens
  REGION 1..144: note = ENSP00000472126
  VARIANT 1: note = Any amino acid
XELPPEPEPEPEPELEPEKADAENGEKEEVPEPTPEPPKKQAPPSPPPKKEEAGGEFWGELEVQRVKFLVSDSPPGEDDMEGSAAGDVSGAGSGGSSGWGLGAGEEAEGDEDENMVYYFLEESTGYMEPALRCLSLLHTLVAFL

SEQ ID NO: 35181 - protein, 4967 aa, Homo sapiens
  REGION 1..4967: note = ENSP00000355533
MADGGEGEDEIQFLRTDDEVVLQCTATIHKEQQKLCLAAEGFGNRLCFLESTSNSKNVPPDLSICTFVLEQSLSVRALQEMLANTVEKSEGQVDVEKWKFMMKTAQGGGHRTLLYGHAILLRHSYSGMYLCCLSTSRSSTDKLAFDVGLQEDTTGEACWWTIHPASKQRSEGEKVRVGDDLILVSVSSERYLHLSYGNGSLHVDAAFQQTLWSVAPISSGSEAAQGYLIGGDVLRLLHGHMDECLTVPSGEHGEEQRRTVHYEGGAVSVHARSLWRLETLRVAWSGSHIRWGQPFRLRHVTTGKYLSLMEDKNLLLMDKEKADVKSTAFTFRSSKEKLDVGVRKEVDGMGTSEIKYGDSVCYIQHVDTGLWLTYQSVDVKSVRMGSIQRKAIMHHEGHMDDGISLSRSQHEESRTARVIRSTVFLFNRFIRGLDALSKKAKASTVDLPIESVSLSLQDLIGYFHPPDEHLEHEDKQNRLRALKNRQNLFQEEGMINLVLECIDRLHVYSSAAHFADVAGREAGESWKSILNSLYELLAALIRGNRKNCAQFSGSLDWLISRLERLEASSGILEVLHCVLVESPEALNIIKEGHIKSIISLLDKHGRNHKVLDVLCSLCVCHGVAVRSNQHLICDNLLPGRDLLLQTRLVNHVSSMRPNIFLGVSEGSAQYKKWYYELMVDHTEPFVTAEATHLRVGWASTEGYSPYPGGGEEWGGNGVGDDLFSYGFDGLHLWSGCIARTVSSPNQHLLRTDDVISCCLDLSAPSISFRINGQPVQGMFENFNIDGLFFPVVSFSAGIKVRFLLGGRHGEFKFLPPPGYAPCYEAVLPKEKLKVEHSREYKQERTYTRDLLGPTVSLTQAAFTPIPVDTSQIVLPPHLERIREKLAENIHELWVMNKIELGWQYGPVRDDNKRQHPCLVEFSKLPEQERNYNLQMSLETLKTLLALGCHVGISDEHAEDKVKKMKLPKNYQLTSGYKPAPMDLSFIKLTPSQEAMVDKLAENAHNVWARDRIRQGWTYGIQQDVKNRRNPRLVPYTLLDDRTKKSNKDSLREAVRTLLGYGYNLEAPDQDHAARAEVCSGTGERFRIFRAEKTYAVKAGRWYFEFETVTAGDMRVGWSRPGCQPDQELGSDERAFAFDGFKAQRWHQGNEHYGRSWQAGDVVGCMVDMNEHTMMFTLNGEILLDDSGSELAFKDFDVGDGFIPVCSLGVAQVGRMNFGKDVSTLKYFTICGLQEGYEPFAVNTNRDITMWLSKRLPQFLQVPSNHEHIEVTRIDGTIDSSPCLKVTQKSFGSQNSNTDIMFYRLSMPIECAEVFSKTVAGGLPGAGLFGPKNDLEDYDADSDFEVLMKTAHGHLVPDRVDKDKEATKPEFNNHKDYAQEKPSRLKQRFLLRRTKPDYSTSHSARLTEDVLADDRDDYDFLMQTSTYYYSVRIFPGQEPANVWVGWITSDFHQYDTGFDLDRVRTVTVTLGDEKGKVHESIKRSNCYMVCAGESMSPGQGRNNNGLEIGCVVDAASGLLTFIANGKELSTYYQVEPSTKLFPAVFAQATSPNVFQFELGRIKNVMPLSAGLFKSEHKNPVPQCPPRLHVQFLSHVLWSRMPNQFLKVDVSRISERQGWLVQCLDPLQFMSLHIPEENRSVDILELTEQEELLKFHYHTLRLYSAVCALGNHRVAHALCSHVDEPQLLYAIENKYMPGLLRAGYYDLLIDIHLSSYATARLMMNNEYIVPMTEETKSITLFPDENKKHGLPGIGLSTSLRPRMQFSSPSFVSISNECYQYSPEFPLDILKSKTIQMLTEAVKEGSLHARDPVGGTTEFLFVPLIKLFYTLLIMGIFHNEDLKHILQLIEPSVFKEAATPEEESDTLEKELSVDDAKLQGAGEEEAKGGKRPKEGLLQMKLPEPVKLQMCLLLQYLCDCQVRHRIEAIVAFSDDFVAKLQDNQRFRYNEVMQALNMSAALTARKTKEFRSPPQEQINMLLNFKDDKSECPCPEEIRDQLLDFHEDLMTHCGIELDEDGSLDGNSDLTIRGRLLSLVEKVTYLKKKQAEKPVESDSKKSSTLQQLISETMVRWAQESVIEDPELVRAMFVLLHRQYDGIGGLVRALPKTYTINGVSVEDTINLLASLGQIRSLLSVRMGKEEEKLMIRGLGDIMNNKVFYQHPNLMRALGMHETVMEVMVNVLGGGESKEITFPKMVANCCRFLCYFCRISRQNQKAMFDHLSYLLENSSVGLASPAMRGSTPLDVAAASVMDNNELALALREPDLEKVVRYLAGCGLQSCQMLVSKGYPDIGWNPVEGERYLDFLRFAVFCNGESVEENANVVVRLLIRRPECFGPALRGEGGNGLLAAMEEAIKIAEDPSRDGPSPNSGSSKTLDTEEEEDDTIHMGNAIMTFYSALIDLLGRCAPEMHLIHAGKGEAIRIRSILRSLIPLGDLVGVISIAFQMPTIAKDGNVVEPDMSAGFCPDHKAAMVLFLDRVYGIEVQDFLLHLLEVGFLPDLRAAASLDTAALSATDMALALNRYLCTAVLPLLTRCAPLFAGTEHHASLIDSLLHTVYRLSKGCSLTKAQRDSIEVCLLSICGQLRPSMMQHLLRRLVFDVPLLNEHAKMPLKLLTNHYERCWKYYCLPGGWGNFGAASEEELHLSRKLFWGIFDALSQKKYEQELFKLALPCLSAVAGALPPDYMESNYVSMMEKQSSMDSEGNFNPQPVDTSNITIPEKLEYFINKYAEHSHDKWSMDKLANGWIYGEIYSDSSKVQPLMKPYKLLSEKEKEIYRWPIKESLKTMLAWGWRIERTREGDSMALYNRTRRISQTSQVSVDAAHGYSPRAIDMSNVTLSRDLHAMAEMMAENYHNIWAKKKKMELESKGGGNHPLLVPYDTLTAKEKAKDREKAQDILKFLQINGYAVSRGFKDLELDTPSIEKRFAYSFLQQLIRYVDEAHQYILEFDGGSRGKGEHFPYEQEIKFFAKVVLPLIDQYFKNHRLYFLSAASRPLCSGGHASNKEKEMVTSLFCKLGVLVRHRISLFGNDATSIVNCLHILGQTLDARTVMKTGLESVKSALRAFLDNAAEDLEKTMENLKQGQFTHTRNQPKGVTQIINYTTVALLPMLSSLFEHIGQHQFGEDLILEDVQVSCYRILTSLYALGTSKSIYVERQRSALGECLAAFAGAFPVAFLETHLDKHNIYSIYNTKSSRERAALSLPTNVEDVCPNIPSLEKLMEEIVELAESGIRYTQMPHVMEVILPMLCSYMSRWWEHGPENNPERAEMCCTALNSEHMNTLLGNILKIIYNNLGIDEGAWMKRLAVFSQPIINKVKPQLLKTHFLPLMEKLKKKAATVVSEEDHLKAEARGDMSEAELLILDEFTTLARDLYAFYPLLIRFVDYNRAKWLKEPNPEAEELFRMVAEVFIYWSKSHNFKREEQNFVVQNEINNMSFLITDTKSKMSKAAVSDQERKKMKRKGDRYSMQTSLIVAALKRLLPIGLNICAPGDQELIALAKNRFSLKDTEDEVRDIIRSNIHLQGKLEDPAIRWQMALYKDLPNRTDDTSDPEKTVERVLDIANVLFHLEQKSKRVGRRHYCLVEHPQRSKKAVWHKLLSKQRKRAVVACFRMAPLYNLPRHRAVNLFLQGYEKSWIETEEHYFEDKLIEDLAKPGAEPPEEDEGTKRVDPLHQLILLFSRTALTEKCKLEEDFLYMAYADIMAKSCHDEEDDDGEEEVKSFEEKEMEKQKLLYQQARLHDRGAAEMVLQTISASKGETGPMVAATLKLGIAILNGGNSTVQQKMLDYLKEKKDVGFFQSLAGLMQSCSVLDLNAFERQNKAEGLGMVTEEGSGEKVLQDDEFTCDLFRFLQLLCEGHNSDFQNYLRTQTGNNTTVNIIISTVDYLLRVQESISDFYWYYSGKDVIDEQGQRNFSKAIQVAKQVFNTLTEYIQGPCTGNQQSLAHSRLWDAVVGFLHVFAHMQMKLSQDSSQIELLKELMDLQKDMVVMLLSMLEGNVVNGTIGKQMVDMLVESSNNVEMILKFFDMFLKLKDLTSSDTFKEYDPDGKGVISKRDFHKAMESHKHYTQSETEFLLSCAETDENETLDYEEFVKRFHEPAKDIGFNVAVLLTNLSEHMPNDTRLQTFLELAESVLNYFQPFLGRIEIMGSAKRIERVYFEISESSRTQWEKPQVKESKRQFIFDVVNEGGEKEKMELFVNFCEDTIFEMQLAAQISESDLNERSANKEESEKERPEEQGPRMAFFSILTVRSALFALRYNILTLMRMLSLKSLKKQMKKVKKMTVKDMVTAFFSSYWSIFMTLLHFVASVFRGFFRIICSLLLGGSLVEGAKKIKVAELLANMPDPTQDEVRGDGEEGERKPLEAALPSEDLTDLKELTEESDLLSDIFGLDLKREGGQYKLIPHNPNAGLSDLMSNPVPMPEVQEKFQEQKAKEEEKEEKEETKSEPEKAEGEDGEKEEKAKEDKGKQKLRQLHTHRYGEPEVPESAFWKKIIAYQQKLLNYFARNFYNMRMLALFVAFAINFILLFYKVSTSSVVEGKELPTRSSSENAKVTSLDSSSHRIIAVHYVLEESSGYMEPTLRILAILHTVISFFCIIGYYCLKVPLVIFKREKEVARKLEFDGLYITEQPSEDDIKGQWDRLVINTQSFPNNYWDKFVKRKVMDKYGEFYGRDRISELLGMDKAALDFSDAREKKKPKKDSSLSAVLNSIDVKYQMWKLGVVFTDNSFLYLAWYMTMSVLGHYNNFFFAAHLLDIAMGFKTLRTILSSVTHNGKQLVLTVGLLAVVVYLYTVVAFNFFRKFYNKSEDGDTPDMKCDDMLTCYMFHMYVGVRAGGGIGDEIEDPAGDEYEIYRIIFDITFFFFVIVILLAIIQGLIIDAFGELRDQQEQVKEDMETKCFICGIGNDYFDTVPHGFETHTLQEHNLANYLFFLMYLINKDETEHTGQESYVWKMYQERCWEFFPAGDCFRKQYEDQLN

SEQ ID NO: 35182 - protein, 4950 aa, Homo sapiens
  REGION 1..4950: note = ENSP00000353174
DDEVVLQCTATIHKEQQKLCLAAEGFGNRLCFLESTSNSKNVPPDLSICTFVLEQSLSVRALQEMLANTVEKSEGQVDVEKWLFSLKTAQGGGHRTLLYGHAILLRHSYSGMYLCCLSTSRSSTDKLAFDVGLQEDTTGEACWWTIHPASKQRSEGEKVRVGDDLILVSVSSERYLHLSYGNGSLHVDAAFQQTLWSVAPISSGSEAAQGYLIGGDVLRLLHGHMDECLTVPSGEHGEEQRRTVHYEGGAVSVHARSLWRLETLRVAWSGSHIRWGQPFRLRHVTTGKYLSLMEDKNLLLMDKEKADVKSTAFTFRSSKEKLDVGVRKEVDGMGTSEIKYGDSVCYIQHVDTGLWLTYQSVDVKSVRMGSIQRKAIMHHEGHMDDGISLSRSQHEESRTARVIRSTVFLFNRFIRGLDALSKKAKASTVDLPIESVSLSLQDLIGYFHPPDEHLEHEDKQNRLRALKNRQNLFQEEGMINLVLECIDRLHVYSSAAHFADVAGREAGESWKSILNSLYELLAALIRGNRKNCAQFSGSLDWLISRLERLEASSGILEVLHCVLVESPEALNIIKEGHIKSIISLLDKHGRNHKVLDVLCSLCVCHGVAVRSNQHLICDNLLPGRDLLLQTRLVNHVSSMRPNIFLGVSEGSAQYKKWYYELMVDHTEPFVTAEATHLRVGWASTEGYSPYPGGGEEWGGNGVGDDLFSYGFDGLHLWSGCIARTVSSPNQHLLRTDDVISCCLDLSAPSISFRINGQPVQGMFENFNIDGLFFPVVSFSAGIKVRFLLGGRHGEFKFLPPPGYAPCYEAVLPKEKLKVEHSREYKQERTYTRDLLGPTVSLTQAAFTPIPVDTSQIVLPPHLERIREKLAENIHELWVMNKIELGWQYGPVRDDNKRQHPCLVEFSKLPEQERNYNLQMSLETLKTLLALGCHVGISDEHAEDKVKKMKLPKNYQLTSGYKPAPMDLSFIKLTPSQEAMVDKLAENAHNVWARDRIRQGWTYGIQQDVKNRRNPRLVPYTLLDDRTKKSNKDSLREAVRTLLGYGYNLEAPDQDHAARAEVCSGTGERFRIFRAEKTYAVKAGRWYFEFETVTAGDMRVGWSRPGCQPDQELGSDERAFAFDGFKAQRWHQGNEHYGRSWQAGDVVGCMVDMNEHTMMFTLNGEILLDDSGSELAFKDFDVGDGFIPVCSLGVAQVGRMNFGKDVSTLKYFTICGLQEGYEPFAVNTNRDITMWLSKRLPQFLQVPSNHEHIEVTRIDGTIDSSPCLKVTQKSFGSQNSNTDIMFYRLSMPIECAEVFSKTVAGGLPGAGLFGPKNDLEDYDADSDFEVLMKTAHGHLVPDRVDKDKEATKPEFNNHKDYAQEKPSRLKQRFLLRRTKPDYSTSHSARLTEDVLADDRDDYDFLMQTSTYYYSVRIFPGQEPANVWVGWITSDFHQYDTGFDLDRVRTVTVTLGDEKGKVHESIKRSNCYMVCAGESMSPGQGRNNNGLEIGCVVDAASGLLTFIANGKELSTYYQVEPSTKLFPAVFAQATSPNVFQFELGRIKNVMPLSAGLFKSEHKNPVPQCPPRLHVQFLSHVLWSRMPNQFLKVDVSRISERQGWLVQCLDPLQFMSLHIPEENRSVDILELTEQEELLKFHYHTLRLYSAVCALGNHRVAHALCSHVDEPQLLYAIENKYMPGLLRAGYYDLLIDIHLSSYATARLMMNNEYIVPMTEETKSITLFPDENKKHGLPGIGLSTSLRPRMQFSSPSFVSISNECYQYSPEFPLDILKSKTIQMLTEAVKEGSLHARDPVGGTTEFLFVPLIKLFYTLLIMGIFHNEDLKHILQLIEPSVFKEAATPEEESDTLEKELSVDDAKLQGAGEEEAKGGKRPKEGLLQMKLPEPVKLQMCLLLQYLCDCQVRHRIEAIVAFSDDFVAKLQDNQRFRYNEVMQALNMSAALTARKTKEFRSPPQEQINMLLNFKDDKSECPCPEEIRDQLLDFHEDLMTHCGIELDEDGSLDGNSDLTIRGRLLSLVEKVTYLKKKQAEKPVESDSKKSSTLQQLISETMVRWAQESVIEDPELVRAMFVLLHRQYDGIGGLVRALPKTYTINGVSVEDTINLLASLGQIRSLLSVRMGKEEEKLMIRGLGDIMNNKVFYQHPNLMRALGMHETVMEVMVNVLGGGESKEITFPKMVANCCRFLCYFCRISRQNQKAMFDHLSYLLENSSVGLASPAMRGSTPLDVAAASVMDNNELALALREPDLEKVVRYLAGCGLQSCQMLVSKGYPDIGWNPVEGERYLDFLRFAVFCNGESVEENANVVVRLLIRRPECFGPALRGEGGNGLLAAMEEAIKIAEDPSRDGPSPNSGSSKTLDTEEEEDDTIHMGNAIMTFYSALIDLLGRCAPEMHLIHAGKGEAIRIRSILRSLIPLGDLVGVISIAFQMPTIAKDGNVVEPDMSAGFCPDHKAAMVLFLDRVYGIEVQDFLLHLLEVGFLPDLRAAASLDTAALSATDMALALNRYLCTAVLPLLTRCAPLFAGTEHHASLIDSLLHTVYRLSKGCSLTKAQRDSIEVCLLSICGQLRPSMMQHLLRRLVFDVPLLNEHAKMPLKLLTNHYERCWKYYCLPGGWGNFGAASEEELHLSRKLFWGIFDALSQKKYEQELFKLALPCLSAVAGALPPDYMESNYVSMMEKQSSMDSEGNFNPQPVDTSNITIPEKLEYFINKYAEHSHDKWSMDKLANGWIYGEIYSDSSKVQPLMKPYKLLSEKEKEIYRWPIKESLKTMLAWGWRIERTREGDSMALYNRTRRISQTSQVSVDAAHGYSPRAIDMSNVTLSRDLHAMAEMMAENYHNIWAKKKKMELESKGGGNHPLLVPYDTLTAKEKAKDREKAQDILKFLQINGYAVSRGFKDLELDTPSIEKRFAYSFLQQLIRYVDEAHQYILEFDGGSRGKGEHFPYEQEIKFFAKVVLPLIDQYFKNHRLYFLSAASRPLCSGGHASNKEKEMVTSLFCKLGVLVRHRISLFGNDATSIVNCLHILGQTLDARTVMKTGLESVKSALRAFLDNAAEDLEKTMENLKQGQFTHTRNQPKGVTQIINYTTVALLPMLSSLFEHIGQHQFGEDLILEDVQVSCYRILTSLYALGTSKSIYVERQRSALGECLAAFAGAFPVAFLETHLDKHNIYSIYNTKSSRERAALSLPTNVEDVCPNIPSLEKLMEEIVELAESGIRYTQMPHVMEVILPMLCSYMSRWWEHGPENNPERAEMCCTALNSEHMNTLLGNILKIIYNNLGIDEGAWMKRLAVFSQPIINKVKPQLLKTHFLPLMEKLKKKAATVVSEEDHLKAEARGDMSEAELLILDEFTTLARDLYAFYPLLIRFVDYNRAKWLKEPNPEAEELFRMVAEVFIYWSKSHNFKREEQNFVVQNEINNMSFLITDTKSKMSKAAVSDQERKKMKRKGDRYSMQTSLIVAALKRLLPIGLNICAPGDQELIALAKNRFSLKDTEDEVRDIIRSNIHLQGKLEDPAIRWQMALYKDLPNRTDDTSDPEKTVERVLDIANVLFHLEQKSKRVGRRHYCLVEHPQRSKKAVWHKLLSKQRKRAVVACFRMAPLYNLPRHRAVNLFLQGYEKSWIETEEHYFEDKLIEDLAKPGAEPPEEDEGTKRVDPLHQLILLFSRTALTEKCKLEEDFLYMAYADIMAKSCHDEEDDDGEEEVKSFEEKEMEKQKLLYQQARLHDRGAAEMVLQTISASKGETGPMVAATLKLGIAILNGGNSTVQQKMLDYLKEKKDVGFFQSLAGLMQSCSVLDLNAFERQNKAEGLGMVTEEGSGEKVLQDDEFTCDLFRFLQLLCEGHNSDFQNYLRTQTGNNTTVNIIISTVDYLLRVQESISDFYWYYSGKDVIDEQGQRNFSKAIQVAKQVFNTLTEYIQGPCTGNQQSLAHSRLWDAVVGFLHVFAHMQMKLSQDSSQIELLKELMDLQKDMVVMLLSMLEGNVVNGTIGKQMVDMLVESSNNVEMILKFFDMFLKLKDLTSSDTFKEYDPDGKGVISKRDFHKAMESHKHYTQSETEFLLSCAETDENETLDYEEFVKRFHEPAKDIGFNVAVLLTNLSEHMPNDTRLQTFLELAESVLNYFQPFLGRIEIMGSAKRIERVYFEISESSRTQWEKPQVKESKRQFIFDVVNEGGEKEKMELFVNFCEDTIFEMQLAAQISESDLNERSANKEESEKERPEEQGPRMAFFSILTVRSALFALRYNILTLMRMLSLKSLKKQMKKVKKMTVKDMVTAFFSSYWSIFMTLLHFVASVFRGFFRIICSLLLGGSLVEGAKKIKVAELLANMPDPTQDEVRGDGEEGERKPLEAALPSEDLTDLKELTEESDLLSDIFGLDLKREGGQYKLIPHNPNAGLSDLMSNPVPMPEVQEKFQVIYLVTAAFSRRAYVLFVCFHRGEDGEKEEKAKEDKGKQKLRQLHTHRYGEPEVPESAFWKKIIAYQQKLLNYFARNFYNMRMLALFVAFAINFILLFYKVSTSSVVEGKELPTRSSSENAKVTSLDSSSHRIIAVHYVLEESSGYMEPTLRILAILHTVISFFCIIGYYCLKVPLVIFKREKEVARKLEFDGLYITEQPSEDDIKGQWDRLVINTQSFPNNYWDKFVKRKVMDKYGEFYGRDRISELLGMDKAALDFSDAREKKKPKKDSSLSAVLNSIDVKYQMWKLGVVFTDNSFLYLAWYMTMSVLGHYNNFFFAAHLLDIAMGFKTLRTILSSVTHNGKQLVLTVGLLAVVVYLYTVVAFNFFRKFYNKSEDGDTPDMKCDDMLTCYMFHMYVGVRAGGGIGDEIEDPAGDEYEIYRIIFDITFFFFVIVILLAIIQGLIIDAFGELRDQQEQVKEDMETKCFICGIGNDYFDTVPHGFETHTLQEHNLANYLFFLMYLINKDETEHTGQESYVWKMYQERCWEFFPAGDCFRKQYEDQLN

SEQ ID NO: 35183 - protein, 4870 aa, Homo sapiens
  REGION 1..4870: note = ENSP00000489262
MAEGGEGGEDEIQFLRTEDEVVLQCIATIHKEQRKFCLAAEGLGNRLCFLEPTSEAKYIPPDLCVCNFVLEQSLSVRALQEMLANTGENGGEGAAQGGGHRTLLYGHAVLLRHSFSGMYLTCLTTSRSQTDKLAFDVGLREHATGEACWWTIHPASKQRSEGEKVRIGDDLILVSVSSERYLHLSVSNGNIQVDASFMQTLWNVHPTCSGSSIEEGYLLGGHVVRLFHGHDECLTIPSTDQNDSQHRRIFYEAGGAGTRARSLWRVEPLRISWSGSNIRWGQAFRLRHLTTGHYLALTEDQGLILQDRAKSDTKSTAFSFRASKELKEKLDSSHKRDIEGMGVPEIKYGDSVCFVQHIASGLWVTYKAQDAKTSRLGPLKRKVILHQEGHMDDGLTLQRCQREESQAARIIRNTTALFSQFVSGNNRTAAPITLPIEEVLQTLQDLIAYFQPPEEEMRHEDKQNKLRSLKNRQNLFKEEGMLALVLNCIDRLNVYNSVAHFAGIAREESGMAWKEILNLLYKLLAALIRGNRNNCAQFSNNLDWLISKLDRLESSSGILEVLHCILTESPEALNLIAEGHIKSIISLLDKHGRNHKVLDILCSLCLCNGVAVRANQNLICDNLLPRRNLLLQTRLINDVTSIRPNIFLGVAEGSAQYKKWYFELIIDQVDPFLTAEPTHLRVGWASSSGYAPYPGGGEGWGGNGVGDDLYSYGFDGLHLWSGRIPRAVASINQHLLRSDDVVSCCLDLGVPSISFRINGQPVQGMFENFNTDGLFFPVMSFSAGVKVRFLMGGRHGEFKFLPPSGYAPCYEALLPKEKMRLEPVKEYKRDADGIRDLLGTTQFLSQASFIPCPVDTSQVILPPHLEKIRDRLAENIHELWGMNKIELGWTFGKIRDDNKRQHPCLVEFSKLPETEKNYNLQMSTETLKTLLALGCHIAHVNPAAEEDLKKVKLPKNYMMSNGYKPAPLDLSDVKLLPPQEILVDKLAENAHNVWAKDRIKQGWTYGIQQDLKNKRNPRLVPYALLDERTKKSNRDSLREAVRTFVGYGYNIEPSDQELADSAVEKVSIDKIRFFRVERSYAVRSGKWYFEFEVVTGGDMRVGWARPGCRPDVELGADDQAFVFEGNRGQRWHQGSGYFGRTWQPGDVVGCMINLDDASMIFTLNGELLITNKGSELAFADYEIENGFVPICCLGLSQIGRMNLGTDASTFKFYTMCGLQEGFEPFAVNMNRDVAMWFSKRLPTFVNVPKDHPHIEVMRIDGTMDSPPCLKVTHKTFGTQNSNADMIYCRLSMPVECHSSFSHSPCLDSEAFQKRKQMQEILSHTTTQCYYAIRIFAGQDPSCVWVGWVTPDYHLYSEKFDLNKNCTVTVTLGDERGRVHESVKRSNCYMVWGGDIVASSQRSNRSNVDLEIGCLVDLAMGMLSFSANGKELGTCYQVEPNTKVFPAVFLQPTSTSLFQFELGKLKNAMPLSAAIFRSEEKNPVPQCPPRLDVQTIQPVLWSRMPNSFLKVETERVSERHGWVVQCLEPLQMMALHIPEENRCVDILELCEQEDLMRFHYHTLRLYSAVCALGNSRVAYALCSHVDLSQLFYAIDNKYLPGLLRSGFYDLLISIHLASAKERKLMMKNEYIIPITSTTRNIRLFPDESKRHGLPGVGLRTCLKPGFRFSTPCFVVTGEDHQKQSPEIPLESLRTKALSMLTEAVQCSGAHIRDPVGGSVEFQFVPVLKLIGTLLVMGVFDDDDVRQILLLIDPSVFGEHSAGTEEGAEKEEVTQVEEKAVEAGEKAGKEAPVKGLLQTRLPESVKLQMCELLSYLCDCELQHRVEAIVAFGDIYVSKLQANQKFRYNELMQALNMSAALTARKTKEFRSPPQEQINMLLNFQLGENCPCPEEIREELYDFHEDLLLHCGVPLEEEEEEEEDTSWTGKLCALVYKIKGPPKPEKEQPTEEEERCPTTLKELISQTMICWAQEDQIQDSELVRMMFNLLRRQYDSIGELLQALRKTYTISHTSVSDTINLLAALGQIRSLLSVRMGKEEELLMINGLGDIMNNKVFYQHPNLMRVLGMHETVMEVMVNVLGTEKSQIAFPKMVASCCRFLCYFCRISRQNQKAMFEHLSYLLENSSVGLASPSMRGSTPLDVAASSVMDNNELALSLEEPDLEKVVTYLAGCGLQSCPMLLAKGYPDVGWNPIEGERYLSFLRFAVFVNSESVEENASVVVKLLIRRPECFGPALRGEGGNGLLAAMQGAIKISENPALDLPSQGYKREVSTGDDEEEEEIVHMGNAIMSFYSALIDLLGRCAPEMHLIQTGKGEAIRIRSILRSLVPTEDLVGIISIPLKLPSLNKDGSVSEPDMAANFCPDHKAPMVLFLDRVYGIKDQTFLLHLLEVGFLPDLRASASLDTVSLSTTEAALALNRYICSAVLPLLTRCAPLFAGTEHCTSLIDSTLQTIYRLSKGRSLTKAQRDTIEECLLAICNHLRPSMLQQLLRRLVFDVPQLNEYCKMPLKLLTNHYEQCWKYYCLPSGWGSYGLAVEEELHLTEKLFWGIFDSLSHKKYDPDLFRMALPCLSAIAGALPPDYLDTRITATLEKQISVDADGNFDPKPINTMNFSLPEKLEYIVTKYAEHSHDKWACDKSQSGWKYGISLDENVKTHPLIRPFKTLTEKEKEIYRWPARESLKTMLAVGWTVERTKEGEALVQQRENEKLRSVSQANQGNSYSPAPLDLSNVVLSRELQGMVEVVAENYHNIWAKKKKLELESKGGGSHPLLVPYDTLTAKEKFKDREKAQDLFKFLQVNGIIVSRGMKDMELDASSMEKRFAYKFLKKILKYVDSAQEFIAHLEAIVSSGKTEKSPRDQEIKFFAKVLLPLVDQYFTSHCLYFLSSPLKPLSSSGYASHKEKEMVAGLFCKLAALVRHRISLFGSDSTTMVSCLHILAQTLDTRTVMKSGSELVKAGLRAFFENAAEDLEKTSENLKLGKFTHSRTQIKGVSQNINYTTVALLPILTSIFEHVTQHQFGMDLLLGDVQISCYHILCSLYSLGTGKNIYVERQRPALGECLASLAAAIPVAFLEPTLNRYNPLSVFNTKTPRERSILGMPDTVEDMCPDIPQLEGLMKEINDLAESGARYTEMPHVIEVILPMLCNYLSYWWERGPENLPPSTGPCCTKVTSEHLSLILGNILKIINNNLGIDEASWMKRIAVYAQPIISKARPDLLRSHFIPTLEKLKKKAVKTVQEEEQLKADGKGDTQEAELLILDEFAVLCRDLYAFYPMLIRYVDNNRSNWLKSPDADSDQLFRMVAEVFILWCKSHNFKREEQNFVIQNEINNLAFLTGDSKSKMSKAMQVKSGGQDQERKKTKRRGDLYSIQTSLIVAALKKMLPIGLNMCTPGDQELISLAKSRYSHRDTDEEVREHLRNNLHLQEKSDDPAVKWQLNLYKDVLKSEEPFNPEKTVERVQRISAAVFHLEQVEQPLRSKKAVWHKLLSKQRKRAVVACFRMAPLYNLPRHRSINLFLHGYQRFWIETEEYSFEEKLVQDLAKSPKVEEEEEEETEKQPDPLHQIILYFSRNALTERSKLEDDPLYTSYSSMMAKSCQSGEDEEEDEDKEKTFEEKEMEKQKTLYQQARLHERGAAEMVLQMISASKGEMSPMVVETLKLGIAILNGGNAGVQQKMLDYLKEKKDAGFFQSLSGLMQSCSVLDLNAFERQNKAEGLGMVTEEGTLIVRERGEKVLQNDEFTRDLFRFLQLLCEGHNSDFQNFLRTQMGNTTTVNVIISTVDYLLRLQESISDFYWYYSGKDIIDESGQHNFSKALAVTKQIFNSLTEYIQGPCIGNQQSLAHSRLWDAVVGFLHVFANMQMKLSQDSSQIELLKELLDLLQDMVVMLLSLLEGNVVNGTIGKQMVDTLVESSTNVEMILKFFDMFLKLKDLTSSDTFKEYDPDGKGIISKKEFQKAMEGQKQYTQSEIDFLLSCAEADENDMFNYVDFVDRFHEPAKDIGFNVAVLLTNLSEHMPNDSRLKCLLDPAESVLNYFEPYLGRIEIMGGAKKIERVYFEISESSRTQWEKPQVKESKRQFIFDVVNEGGEQEKMELFVNFCEDTIFEMQLASQISESDSADRPEEEEEDEDSSYVLEIAGEEEEDGSLEPASAFAMACASVKRNVTDFLKRATLKNLRKQYRNVKKMTAKELVKVLFSFFWMLFVGLFQLLFTILGGIFQILWSTVFGGGLVEGAKNIRVTKILGDMPDPTQFGIHDDTMEAERAEVMEPGITTELVHFIKGEKGDTDIMSDLFGLHPKKEGSLKHGPEVGLGDLSEIIGKDEPPTLESTVQKKRKAQAAEMKAANEAEGKVESEKADMEDGEKEDKDKEEEQAEYLWTEVTKKKKRRCGQKVEKPEAFTANFFKGLEIYQTKLLHYLARNFYNLRFLALFVAFAINFILLFYKVTEEPLEEETEDVANLWNSFNDEEEEEAMVFFVLQESTGYMAPTLRALAIIHTIISLVCVVGYYCLKVPLVVFKREKEIARKLEFDGLYITEQPSEDDIKGQWDRLVINTPSFPNNYWDKFVKRKVINKYGDLYGAERIAELLGLDKNALDFSPVEETKAEAASLVSWLSSIDMKYHIWKLGVVFTDNSFLYLAWYTTMSVLGHYNNFFFAAHLLDIAMGFKTLRTILSSVTHNGKQLVLTVGLLAVVVYLYTVVAFNFFRKFYNKSEDDDEPDMKCDDMMTCYLFHMYVGVRAGGGIGDEIEDPAGDPYEMYRIVFDITFFFFVIVILLAIIQGLIIDAFGELRDQQEQVREDMETKCFICGIGNDYFDTTPHGFETHTLQEHNLANYLFFLMYLINKDETEHTGQESYVWKMYQERCWDFFPAGDCFRKQYEDQLG

SEQ ID NO: 35184 - protein, 4865 aa, Homo sapiens
  REGION 1..4865: note = ENSP00000399610
MAEGGEGGEDEIQFLRTEDEVVLQCIATIHKEQRKFCLAAEGLGNRLCFLEPTSEAKYIPPDLCVCNFVLEQSLSVRALQEMLANTGENGGEGAAQGGGHRTLLYGHAVLLRHSFSGMYLTCLTTSRSQTDKLAFDVGLREHATGEACWWTIHPASKQRSEGEKVRIGDDLILVSVSSERYLHLSVSNGNIQVDASFMQTLWNVHPTCSGSSIEEGYLLGGHVVRLFHGHDECLTIPSTDQNDSQHRRIFYEAGGAGTRARSLWRVEPLRISWSGSNIRWGQAFRLRHLTTGHYLALTEDQGLILQDRAKSDTKSTAFSFRASKELKEKLDSSHKRDIEGMGVPEIKYGDSVCFVQHIASGLWVTYKAQDAKTSRLGPLKRKVILHQEGHMDDGLTLQRCQREESQAARIIRNTTALFSQFVSGNNRTAAPITLPIEEVLQTLQDLIAYFQPPEEEMRHEDKQNKLRSLKNRQNLFKEEGMLALVLNCIDRLNVYNSVAHFAGIAREESGMAWKEILNLLYKLLAALIRGNRNNCAQFSNNLDWLISKLDRLESSSGILEVLHCILTESPEALNLIAEGHIKSIISLLDKHGRNHKVLDILCSLCLCNGVAVRANQNLICDNLLPRRNLLLQTRLINDVTSIRPNIFLGVAEGSAQYKKWYFELIIDQVDPFLTAEPTHLRVGWASSSGYAPYPGGGEGWGGNGVGDDLYSYGFDGLHLWSGRIPRAVASINQHLLRSDDVVSCCLDLGVPSISFRINGQPVQGMFENFNTDGLFFPVMSFSAGVKVRFLMGGRHGEFKFLPPSGYAPCYEALLPKEKMRLEPVKEYKRDADGIRDLLGTTQFLSQASFIPCPVDTSQVILPPHLEKIRDRLAENIHELWGMNKIELGWTFGKIRDDNKRQHPCLVEFSKLPETEKNYNLQMSTETLKTLLALGCHIAHVNPAAEEDLKKVKLPKNYMMSNGYKPAPLDLSDVKLLPPQEILVDKLAENAHNVWAKDRIKQGWTYGIQQDLKNKRNPRLVPYALLDERTKKSNRDSLREAVRTFVGYGYNIEPSDQELADSAVEKVSIDKIRFFRVERSYAVRSGKWYFEFEVVTGGDMRVGWARPGCRPDVELGADDQAFVFEGNRGQRWHQGSGYFGRTWQPGDVVGCMINLDDASMIFTLNGELLITNKGSELAFADYEIENGFVPICCLGLSQIGRMNLGTDASTFKFYTMCGLQEGFEPFAVNMNRDVAMWFSKRLPTFVNVPKDHPHIEVMRIDGTMDSPPCLKVTHKTFGTQNSNADMIYCRLSMPVECHSSFSHSPCLDSEAFQKRKQMQEILSHTTTQCYYAIRIFAGQDPSCVWVGWVTPDYHLYSEKFDLNKNCTVTVTLGDERGRVHESVKRSNCYMVWGGDIVASSQRSNRSNVDLEIGCLVDLAMGMLSFSANGKELGTCYQVEPNTKVFPAVFLQPTSTSLFQFELGKLKNAMPLSAAIFRSEEKNPVPQCPPRLDVQTIQPVLWSRMPNSFLKVETERVSERHGWVVQCLEPLQMMALHIPEENRCVDILELCEQEDLMRFHYHTLRLYSAVCALGNSRVAYALCSHVDLSQLFYAIDNKYLPGLLRSGFYDLLISIHLASAKERKLMMKNEYIIPITSTTRNIRLFPDESKRHGLPGVGLRTCLKPGFRFSTPCFVVTGEDHQKQSPEIPLESLRTKALSMLTEAVQCSGAHIRDPVGGSVEFQFVPVLKLIGTLLVMGVFDDDDVRQILLLIDPSVFGEHSAGTEEGAEKEEVTQVEEKAVEAGEKAGKEAPVKGLLQTRLPESVKLQMCELLSYLCDCELQHRVEAIVAFGDIYVSKLQANQKFRYNELMQALNMSAALTARKTKEFRSPPQEQINMLLNFQLGENCPCPEEIREELYDFHEDLLLHCGVPLEEEEEEEEDTSWTGKLCALVYKIKGPPKPEKEQPTEEEERCPTTLKELISQTMICWAQEDQIQDSELVRMMFNLLRRQYDSIGELLQALRKTYTISHTSVSDTINLLAALGQIRSLLSVRMGKEEELLMINGLGDIMNNKVFYQHPNLMRVLGMHETVMEVMVNVLGTEKSQIAFPKMVASCCRFLCYFCRISRQNQKAMFEHLSYLLENSSVGLASPSMRGSTPLDVAASSVMDNNELALSLEEPDLEKVVTYLAGCGLQSCPMLLAKGYPDVGWNPIEGERYLSFLRFAVFVNSESVEENASVVVKLLIRRPECFGPALRGEGGNGLLAAMQGAIKISENPALDLPSQGYKREVSTGDDEEEEEIVHMGNAIMSFYSALIDLLGRCAPEMHLIQTGKGEAIRIRSILRSLVPTEDLVGIISIPLKLPSLNKDGSVSEPDMAANFCPDHKAPMVLFLDRVYGIKDQTFLLHLLEVGFLPDLRASASLDTVSLSTTEAALALNRYICSAVLPLLTRCAPLFAGTEHCTSLIDSTLQTIYRLSKGRSLTKAQRDTIEECLLAICNHLRPSMLQQLLRRLVFDVPQLNEYCKMPLKLLTNHYEQCWKYYCLPSGWGSYGLAVEEELHLTEKLFWGIFDSLSHKKYDPDLFRMALPCLSAIAGALPPDYLDTRITATLEKQISVDADGNFDPKPINTMNFSLPEKLEYIVTKYAEHSHDKWACDKSQSGWKYGISLDENVKTHPLIRPFKTLTEKEKEIYRWPARESLKTMLAVGWTVERTKEGEALVQQRENEKLRSVSQANQGNSYSPAPLDLSNVVLSRELQGMVEVVAENYHNIWAKKKKLELESKGGGSHPLLVPYDTLTAKEKFKDREKAQDLFKFLQVNGIIVSRGMKDMELDASSMEKRFAYKFLKKILKYVDSAQEFIAHLEAIVSSGKTEKSPRDQEIKFFAKVLLPLVDQYFTSHCLYFLSSPLKPLSSSGYASHKEKEMVAGLFCKLAALVRHRISLFGSDSTTMVSCLHILAQTLDTRTVMKSGSELVKAGLRAFFENAAEDLEKTSENLKLGKFTHSRTQIKGVSQNINYTTVALLPILTSIFEHVTQHQFGMDLLLGDVQISCYHILCSLYSLGTGKNIYVERQRPALGECLASLAAAIPVAFLEPTLNRYNPLSVFNTKTPRERSILGMPDTVEDMCPDIPQLEGLMKEINDLAESGARYTEMPHVIEVILPMLCNYLSYWWERGPENLPPSTGPCCTKVTSEHLSLILGNILKIINNNLGIDEASWMKRIAVYAQPIISKARPDLLRSHFIPTLEKLKKKAVKTVQEEEQLKADGKGDTQEAELLILDEFAVLCRDLYAFYPMLIRYVDNNRSNWLKSPDADSDQLFRMVAEVFILWCKSHNFKREEQNFVIQNEINNLAFLTGDSKSKMSKSGGQDQERKKTKRRGDLYSIQTSLIVAALKKMLPIGLNMCTPGDQELISLAKSRYSHRDTDEEVREHLRNNLHLQEKSDDPAVKWQLNLYKDVLKSEEPFNPEKTVERVQRISAAVFHLEQVEQPLRSKKAVWHKLLSKQRKRAVVACFRMAPLYNLPRHRSINLFLHGYQRFWIETEEYSFEEKLVQDLAKSPKVEEEEEEETEKQPDPLHQIILYFSRNALTERSKLEDDPLYTSYSSMMAKSCQSGEDEEEDEDKEKTFEEKEMEKQKTLYQQARLHERGAAEMVLQMISASKGEMSPMVVETLKLGIAILNGGNAGVQQKMLDYLKEKKDAGFFQSLSGLMQSCSVLDLNAFERQNKAEGLGMVTEEGTLIVRERGEKVLQNDEFTRDLFRFLQLLCEGHNSDFQNFLRTQMGNTTTVNVIISTVDYLLRLQESISDFYWYYSGKDIIDESGQHNFSKALAVTKQIFNSLTEYIQGPCIGNQQSLAHSRLWDAVVGFLHVFANMQMKLSQDSSQIELLKELLDLLQDMVVMLLSLLEGNVVNGTIGKQMVDTLVESSTNVEMILKFFDMFLKLKDLTSSDTFKEYDPDGKGIISKKEFQKAMEGQKQYTQSEIDFLLSCAEADENDMFNYVDFVDRFHEPAKDIGFNVAVLLTNLSEHMPNDSRLKCLLDPAESVLNYFEPYLGRIEIMGGAKKIERVYFEISESSRTQWEKPQVKESKRQFIFDVVNEGGEQEKMELFVNFCEDTIFEMQLASQISESDSADRPEEEEEDEDSSYVLEIAGEEEEDGSLEPASAFAMACASVKRNVTDFLKRATLKNLRKQYRNVKKMTAKELVKVLFSFFWMLFVGLFQLLFTILGGIFQILWSTVFGGGLVEGAKNIRVTKILGDMPDPTQFGIHDDTMEAERAEVMEPGITTELVHFIKGEKGDTDIMSDLFGLHPKKEGSLKHGPEVGLGDLSEIIGKDEPPTLESTVQKKRKAQAAEMKAANEAEGKVESEKADMEDGEKEDKDKEEEQAEYLWTEVTKKKKRRCGQKVEKPEAFTANFFKGLEIYQTKLLHYLARNFYNLRFLALFVAFAINFILLFYKVTEEPLEEETEDVANLWNSFNDEEEEEAMVFFVLQESTGYMAPTLRALAIIHTIISLVCVVGYYCLKVPLVVFKREKEIARKLEFDGLYITEQPSEDDIKGQWDRLVINTPSFPNNYWDKFVKRKVINKYGDLYGAERIAELLGLDKNALDFSPVEETKAEAASLVSWLSSIDMKYHIWKLGVVFTDNSFLYLAWYTTMSVLGHYNNFFFAAHLLDIAMGFKTLRTILSSVTHNGKQLVLTVGLLAVVVYLYTVVAFNFFRKFYNKSEDDDEPDMKCDDMMTCYLFHMYVGVRAGGGIGDEIEDPAGDPYEMYRIVFDITFFFFVIVILLAIIQGLIIDAFGELRDQQEQVREDMETKCFICGIGNDYFDTTPHGFETHTLQEHNLANYLFFLMYLINKDETEHTGQESYVWKMYQERCWDFFPAGDCFRKQYEDQLG

SEQ ID NO: 35185 - protein, 4869 aa, Homo sapiens
  REGION 1..4869: note = ENSP00000373884
MAEGGEGGEDEIQFLRTEDEVVLQCIATIHKEQRKFCLAAEGLGNRLCFLEPTSEAKYIPPDLCVCNFVLEQSLSVRALQEMLANTGENGGEGAAQGGGHRTLLYGHAVLLRHSFSGMYLTCLTTSRSQTDKLAFDVGLREHATGEACWWTIHPASKQRSEGEKVRIGDDLILVSVSSERYLHLSVSNGNIQVDASFMQTLWNVHPTCSGSSIEEGYLLGGHVVRLFHGHDECLTIPSTDQNDSQHRRIFYEAGGAGTRARSLWRVEPLRISWSGSNIRWGQAFRLRHLTTGHYLALTEDQGLILQDRAKSDTKSTAFSFRASKELKEKLDSSHKRDIEGMGVPEIKYGDSVCFVQHIASGLWVTYKAQDAKTSRLGPLKRKVILHQEGHMDDGLTLQRCQREESQAARIIRNTTALFSQFVSGNNRTAAPITLPIEEVLQTLQDLIAYFQPPEEEMRHEDKQNKLRSLKNRQNLFKEEGMLALVLNCIDRLNVYNSVAHFAGIAREESGMAWKEILNLLYKLLAALIRGNRNNCAQFSNNLDWLISKLDRLESSSGILEVLHCILTESPEALNLIAEGHIKSIISLLDKHGRNHKVLDILCSLCLCNGVAVRANQNLICDNLLPRRNLLLQTRLINDVTSIRPNIFLGVAEGSAQYKKWYFELIIDQVDPFLTAEPTHLRVGWASSSGYAPYPGGGEGWGGNGVGDDLYSYGFDGLHLWSGRIPRAVASINQHLLRSDDVVSCCLDLGVPSISFRINGQPVQGMFENFNTDGLFFPVMSFSAGVKVRFLMGGRHGEFKFLPPSGYAPCYEALLPKEKMRLEPVKEYKRDADGIRDLLGTTQFLSQASFIPCPVDTSQVILPPHLEKIRDRLAENIHELWGMNKIELGWTFGKIRDDNKRQHPCLVEFSKLPETEKNYNLQMSTETLKTLLALGCHIAHVNPAAEEDLKKVKLPKNYMMSNGYKPAPLDLSDVKLLPPQEILVDKLAENAHNVWAKDRIKQGWTYGIQQDLKNKRNPRLVPYALLDERTKKSNRDSLREAVRTFVGYGYNIEPSDQELADSAVEKVSIDKIRFFRVERSYAVRSGKWYFEFEVVTGGDMRVGWARPGCRPDVELGADDQAFVFEGNRGQRWHQGSGYFGRTWQPGDVVGCMINLDDASMIFTLNGELLITNKGSELAFADYEIENGFVPICCLGLSQIGRMNLGTDASTFKFYTMCGLQEGFEPFAVNMNRDVAMWFSKRLPTFVNVPKDHPHIEVMRIDGTMDSPPCLKVTHKTFGTQNSNADMIYCRLSMPVECHSSFSHSPCLDSEAFQKRKQMQEILSHTTTQCYYAIRIFAGQDPSCVWVGWVTPDYHLYSEKFDLNKNCTVTVTLGDERGRVHESVKRSNCYMVWGGDIVASSQRSNRSNVDLEIGCLVDLAMGMLSFSANGKELGTCYQVEPNTKVFPAVFLQPTSTSLFQFELGKLKNAMPLSAAIFRSEEKNPVPQCPPRLDVQTIQPVLWSRMPNSFLKVETERVSERHGWVVQCLEPLQMMALHIPEENRCVDILELCEQEDLMRFHYHTLRLYSAVCALGNSRVAYALCSHVDLSQLFYAIDNKYLPGLLRSGFYDLLISIHLASAKERKLMMKNEYIIPITSTTRNIRLFPDESKRHGLPGVGLRTCLKPGFRFSTPCFVVTGEDHQKQSPEIPLESLRTKALSMLTEAVQCSGAHIRDPVGGSVEFQFVPVLKLIGTLLVMGVFDDDDVRQILLLIDPSVFGEHSAGTEEGAEKEEVTQVEEKAVEAGEKAGKEAPVKGLLQTRLPESVKLQMCELLSYLCDCELQHRVEAIVAFGDIYVSKLQANQKFRYNELMQALNMSAALTARKTKEFRSPPQEQINMLLNFQLGENCPCPEEIREELYDFHEDLLLHCGVPLEEEEEEEEDTSWTGKLCALVYKIKGPPKPEKEQPTEEEERCPTTLKELISQTMICWAQEDQIQDSELVRMMFNLLRRQYDSIGELLQALRKTYTISHTSVSDTINLLAALGQIRSLLSVRMGKEEELLMINGLGDIMNNKVFYQHPNLMRVLGMHETVMEVMVNVLGTEKSQIAFPKMVASCCRFLCYFCRISRQNQKAMFEHLSYLLENSSVGLASPSMRGSTPLDVAASSVMDNNELALSLEEPDLEKVVTYLAGCGLQSCPMLLAKGYPDVGWNPIEGERYLSFLRFAVFVNSESVEENASVVVKLLIRRPECFGPALRGEGGNGLLAAMQGAIKISENPALDLPSQGYKREVTGDDEEEEEIVHMGNAIMSFYSALIDLLGRCAPEMHLIQTGKGEAIRIRSILRSLVPTEDLVGIISIPLKLPSLNKDGSVSEPDMAANFCPDHKAPMVLFLDRVYGIKDQTFLLHLLEVGFLPDLRASASLDTVSLSTTEAALALNRYICSAVLPLLTRCAPLFAGTEHCTSLIDSTLQTIYRLSKGRSLTKAQRDTIEECLLAICNHLRPSMLQQLLRRLVFDVPQLNEYCKMPLKLLTNHYEQCWKYYCLPSGWGSYGLAVEEELHLTEKLFWGIFDSLSHKKYDPDLFRMALPCLSAIAGALPPDYLDTRITATLEKQISVDADGNFDPKPINTMNFSLPEKLEYIVTKYAEHSHDKWACDKSQSGWKYGISLDENVKTHPLIRPFKTLTEKEKEIYRWPARESLKTMLAVGWTVERTKEGEALVQQRENEKLRSVSQANQGNSYSPAPLDLSNVVLSRELQGMVEVVAENYHNIWAKKKKLELESKGGGSHPLLVPYDTLTAKEKFKDREKAQDLFKFLQVNGIIVSRGMKDMELDASSMEKRFAYKFLKKILKYVDSAQEFIAHLEAIVSSGKTEKSPRDQEIKFFAKVLLPLVDQYFTSHCLYFLSSPLKPLSSSGYASHKEKEMVAGLFCKLAALVRHRISLFGSDSTTMVSCLHILAQTLDTRTVMKSGSELVKAGLRAFFENAAEDLEKTSENLKLGKFTHSRTQIKGVSQNINYTTVALLPILTSIFEHVTQHQFGMDLLLGDVQISCYHILCSLYSLGTGKNIYVERQRPALGECLASLAAAIPVAFLEPTLNRYNPLSVFNTKTPRERSILGMPDTVEDMCPDIPQLEGLMKEINDLAESGARYTEMPHVIEVILPMLCNYLSYWWERGPENLPPSTGPCCTKVTSEHLSLILGNILKIINNNLGIDEASWMKRIAVYAQPIISKARPDLLRSHFIPTLEKLKKKAVKTVQEEEQLKADGKGDTQEAELLILDEFAVLCRDLYAFYPMLIRYVDNNRSNWLKSPDADSDQLFRMVAEVFILWCKSHNFKREEQNFVIQNEINNLAFLTGDSKSKMSKAMQVKSGGQDQERKKTKRRGDLYSIQTSLIVAALKKMLPIGLNMCTPGDQELISLAKSRYSHRDTDEEVREHLRNNLHLQEKSDDPAVKWQLNLYKDVLKSEEPFNPEKTVERVQRISAAVFHLEQVEQPLRSKKAVWHKLLSKQRKRAVVACFRMAPLYNLPRHRSINLFLHGYQRFWIETEEYSFEEKLVQDLAKSPKVEEEEEEETEKQPDPLHQIILYFSRNALTERSKLEDDPLYTSYSSMMAKSCQSGEDEEEDEDKEKTFEEKEMEKQKTLYQQARLHERGAAEMVLQMISASKGEMSPMVVETLKLGIAILNGGNAGVQQKMLDYLKEKKDAGFFQSLSGLMQSCSVLDLNAFERQNKAEGLGMVTEEGTLIVRERGEKVLQNDEFTRDLFRFLQLLCEGHNSDFQNFLRTQMGNTTTVNVIISTVDYLLRLQESISDFYWYYSGKDIIDESGQHNFSKALAVTKQIFNSLTEYIQGPCIGNQQSLAHSRLWDAVVGFLHVFANMQMKLSQDSSQIELLKELLDLLQDMVVMLLSLLEGNVVNGTIGKQMVDTLVESSTNVEMILKFFDMFLKLKDLTSSDTFKEYDPDGKGIISKKEFQKAMEGQKQYTQSEIDFLLSCAEADENDMFNYVDFVDRFHEPAKDIGFNVAVLLTNLSEHMPNDSRLKCLLDPAESVLNYFEPYLGRIEIMGGAKKIERVYFEISESSRTQWEKPQVKESKRQFIFDVVNEGGEQEKMELFVNFCEDTIFEMQLASQISESDSADRPEEEEEDEDSSYVLEIAGEEEEDGSLEPASAFAMACASVKRNVTDFLKRATLKNLRKQYRNVKKMTAKELVKVLFSFFWMLFVGLFQLLFTILGGIFQILWSTVFGGGLVEGAKNIRVTKILGDMPDPTQFGIHDDTMEAERAEVMEPGITTELVHFIKGEKGDTDIMSDLFGLHPKKEGSLKHGPEVGLGDLSEIIGKDEPPTLESTVQKKRKAQAAEMKAANEAEGKVESEKADMEDGEKEDKDKEEEQAEYLWTEVTKKKKRRCGQKVEKPEAFTANFFKGLEIYQTKLLHYLARNFYNLRFLALFVAFAINFILLFYKVTEEPLEEETEDVANLWNSFNDEEEEEAMVFFVLQESTGYMAPTLRALAIIHTIISLVCVVGYYCLKVPLVVFKREKEIARKLEFDGLYITEQPSEDDIKGQWDRLVINTPSFPNNYWDKFVKRKVINKYGDLYGAERIAELLGLDKNALDFSPVEETKAEAASLVSWLSSIDMKYHIWKLGVVFTDNSFLYLAWYTTMSVLGHYNNFFFAAHLLDIAMGFKTLRTILSSVTHNGKQLVLTVGLLAVVVYLYTVVAFNFFRKFYNKSEDDDEPDMKCDDMMTCYLFHMYVGVRAGGGIGDEIEDPAGDPYEMYRIVFDITFFFFVIVILLAIIQGLIIDAFGELRDQQEQVREDMETKCFICGIGNDYFDTTPHGFETHTLQEHNLANYLFFLMYLINKDETEHTGQESYVWKMYQERCWDFFPAGDCFRKQYEDQLG

SEQ ID NO: 35186 - protein, 4859 aa, Homo sapiens
  REGION 1..4859: note = ENSP00000489529
MAEGGEGGEDEIQFLRTEDEVVLQCIATIHKEQRKFCLAAEGLGNRLCFLEPTSEAKYIPPDLCVCNFVLEQSLSVRALQEMLANTGENGGEGAAQGGGHRTLLYGHAVLLRHSFSGMYLTCLTTSRSQTDKLAFDVGLREHATGEACWWTIHPASKQRSEGEKVRIGDDLILVSVSSERYLHLSVSNGNIQVDASFMQTLWNVHPTCSGSSIEEGYLLGGHVVRLFHGHDECLTIPSTDQNDSQHRRIFYEAGGAGTRARSLWRVEPLRISWSGSNIRWGQAFRLRHLTTGHYLALTEDQGLILQDRAKSDTKSTAFSFRASKELKEKLDSSHKRDIEGMGVPEIKYGDSVCFVQHIASGLWVTYKAQDAKTSRLGPLKRKVILHQEGHMDDGLTLQRCQREESQAARIIRNTTALFSQFVSGNNRTAAPITLPIEEVLQTLQDLIAYFQPPEEEMRHEDKQNKLRSLKNRQNLFKEEGMLALVLNCIDRLNVYNSVAHFAGIAREESGMAWKEILNLLYKLLAALIRGNRNNCAQFSNNLDWLISKLDRLESSSGILEVLHCILTESPEALNLIAEGHIKSIISLLDKHGRNHKVLDILCSLCLCNGVAVRANQNLICDNLLPRRNLLLQTRLINDVTSIRPNIFLGVAEGSAQYKKWYFELIIDQVDPFLTAEPTHLRVGWASSSGYAPYPGGGEGWGGNGVGDDLYSYGFDGLHLWSGRIPRAVASINQHLLRSDDVVSCCLDLGVPSISFRINGQPVQGMFENFNTDGLFFPVMSFSAGVKVRFLMGGRHGEFKFLPPSGYAPCYEALLPKEKMRLEPVKEYKRDADGIRDLLGTTQFLSQASFIPCPVDTSQVILPPHLEKIRDRLAENIHELWGMNKIELGWTFGKIRDDNKRQHPCLVEFSKLPETEKNYNLQMSTETLKTLLALGCHIAHVNPAAEEDLKKVKLPKNYMMSNGYKPAPLDLSDVKLLPPQEILVDKLAENAHNVWAKDRIKQGWTYGIQQDLKNKRNPRLVPYALLDERTKKSNRDSLREAVRTFVGYGYNIEPSDQELADSAVEKVSIDKIRFFRVERSYAVRSGKWYFEFEVVTGGDMRVGWARPGCRPDVELGADDQAFVFEGNRGQRWHQGSGYFGRTWQPGDVVGCMINLDDASMIFTLNGELLITNKGSELAFADYEIENGFVPICCLGLSQIGRMNLGTDASTFKFYTMCGLQEGFEPFAVNMNRDVAMWFSKRLPTFVNVPKDHPHIEVMRIDGTMDSPPCLKVTHKTFGTQNSNADMIYCRLSMPVECHSSFSHSPCLDSEAFQKRKQMQEILSHTTTQCYYAIRIFAGQDPSCVWVGWVTPDYHLYSEKFDLNKNCTVTVTLGDERGRVHESVKRSNCYMVWGGDIVASSQRSNRSNVDLEIGCLVDLAMGMLSFSANGKELGTCYQVEPNTKVFPAVFLQPTSTSLFQFELGKLKNAMPLSAAIFRSEEKNPVPQCPPRLDVQTIQPVLWSRMPNSFLKVETERVSERHGWVVQCLEPLQMMALHIPEENRCVDILELCEQEDLMRFHYHTLRLYSAVCALGNSRVAYALCSHVDLSQLFYAIDNKYLPGLLRSGFYDLLISIHLASAKERKLMMKNEYIIPITSTTRNIRLFPDESKRHGLPGVGLRTCLKPGFRFSTPCFVVTGEDHQKQSPEIPLESLRTKALSMLTEAVQCSGAHIRDPVGGSVEFQFVPVLKLIGTLLVMGVFDDDDVRQILLLIDPSVFGEHSAGTEEGAEKEEVTQVEEKAVEAGEKAGKEAPVKGLLQTRLPESVKLQMCELLSYLCDCELQHRVEAIVAFGDIYVSKLQANQKFRYNELMQALNMSAALTARKTKEFRSPPQEQINMLLNFQLGENCPCPEEIREELYDFHEDLLLHCGVPLEEEEEEEEDTSWTGKLCALVYKIKGPPKPEKEQPTEEEERCPTTLKELISQTMICWAQEDQIQDSELVRMMFNLLRRQYDSIGELLQALRKTYTISHTSVSDTINLLAALGQIRSLLSVRMGKEEELLMINGLGDIMNNKVFYQHPNLMRVLGMHETVMEVMVNVLGTEKSQIAFPKMVASCCRFLCYFCRISRQNQKAMFEHLSYLLENSSVGLASPSMRGSTPLDVAASSVMDNNELALSLEEPDLEKVVTYLAGCGLQSCPMLLAKGYPDVGWNPIEGERYLSFLRFAVFVNSESVEENASVVVKLLIRRPECFGPALRGEGGNGLLAAMQGAIKISENPALDLPSQGYKREVTGDDEEEEEIVHMGNAIMSFYSALIDLLGRCAPEMHLIQTGKGEAIRIRSILRSLVPTEDLVGIISIPLKLPSLNKDGSVSEPDMAANFCPDHKAPMVLFLDRVYGIKDQTFLLHLLEVGFLPDLRASASLDTVSLSTTEAALALNRYICSAVLPLLTRCAPLFAGTEHCTSLIDSTLQTIYRLSKGRSLTKAQRDTIEECLLAICNHLRPSMLQQLLRRLVFDVPQLNEYCKMPLKLLTNHYEQCWKYYCLPSGWGSYGLAVEEELHLTEKLFWGIFDSLSHKKYDPDLFRMALPCLSAIAGALPPDYLDTRITATLEKQISVDADGNFDPKPINTMNFSLPEKLEYIVTKYAEHSHDKWACDKSQSGWKYGISLDENVKTHPLIRPFKTLTEKEKEIYRWPARESLKTMLAVGWTVERTKEGEALVQQRENEKLRSVSQANQGNSYSPAPLDLSNVVLSRELQGMVEVVAENYHNIWAKKKKLELESKGGGSHPLLVPYDTLTAKEKFKDREKAQDLFKFLQVNGIIVSRGMKDMELDASSMEKRFAYKFLKKILKYVDSAQEFIAHLEAIVSSGKTEKSPRDQEIKFFAKVLLPLVDQYFTSHCLYFLSSPLKPLSSSGYASHKEKEMVAGLFCKLAALVRHRISLFGSDSTTMVSCLHILAQTLDTRTVMKSGSELVKAGLRAFFENAAEDLEKTSENLKLGKFTHSRTQIKGVSQNINYTTVALLPILTSIFEHVTQHQFGMDLLLGDVQISCYHILCSLYSLGTGKNIYVERQRPALGECLASLAAAIPVAFLEPTLNRYNPLSVFNTKTPRERSILGMPDTVEDMCPDIPQLEGLMKEINDLAESGARYTEMPHVIEVILPMLCNYLSYWWERGPENLPPSTGPCCTKVTSEHLSLILGNILKIINNNLGIDEASWMKRIAVYAQPIISKARPDLLRSHFIPTLEKLKKKAVKTVQEEEQLKADGKGDTQEAELLILDEFAVLCRDLYAFYPMLIRYVDNNRSNWLKSPDADSDQLFRMVAEVFILWCKSHNFKREEQNFVIQNEINNLAFLTGDSKSKMSKSGGQDQERKKTKRRGDLYSIQTSLIVAALKKMLPIGLNMCTPGDQELISLAKSRYSHRDTDEEVREHLRNNLHLQEKSDDPAVKWQLNLYKDVLKSEEPFNPEKTVERVQRISAAVFHLEQVEQPLRSKKAVWHKLLSKQRKRAVVACFRMAPLYNLPRHKINNFFLSTFQQVWLEKVNEKTQYDRLIPILMKSPKVEEEEEEETEKQPDPLHQIILYFSRNALTERSKLEDDPLYTSYSSMMAKSCQSGEDEEEDEDKEKTFEEKEMEKQKTLYQQARLHERGAAEMVLQMISASKGEMSPMVVETLKLGIAILNGGNAGVQQKMLDYLKEKKDAGFFQSLSGLMQSCSVLDLNAFERQNKAEGLGMVTEEGTREKVLQNDEFTRDLFRFLQLLCEGHNSDFQNFLRTQMGNTTTVNVIISTVDYLLRLQESISDFYWYYSGKDIIDESGQHNFSKALAVTKQIFNSLTEYIQGPCIGNQQSLAHSRLWDAVVGFLHVFANMQMKLSQDSSQIELLKELLDLLQDMVVMLLSLLEGNVVNGTIGKQMVDTLVESSTNVEMILKFFDMFLKLKDLTSSDTFKEYDPDGKGIISKKEFQKAMEGQKQYTQSEIDFLLSCAEADENDMFNYVDFVDRFHEPAKDIGFNVAVLLTNLSEHMPNDSRLKCLLDPAESVLNYFEPYLGRIEIMGGAKKIERVYFEISESSRTQWEKPQVKESKRQFIFDVVNEGGEQEKMELFVNFCEDTIFEMQLASQISESDSADRPEEEEEDEDSSYVLEIAGEEEEDGSLEPASAFAMACASVKRNVTDFLKRATLKNLRKQYRNVKKMTAKELVKVLFSFFWMLFVGLFQLLFTILGGIFQILWSTVFGGGLVEGAKNIRVTKILGDMPDPTQFGIHDDTMEAERAEVMEPGITTELVHFIKGEKGDTDIMSDLFGLHPKKEGSLKHGPEVGLGDLSEIIGKDEPPTLESTVQKKRKAQAAEMKAANEAEGKVESEKADMEDGEKEDKDKEEEQAEYLWTEVTKKKKRRCGQKVEKPEAFTANFFKGLEIYQTKLLHYLARNFYNLRFLALFVAFAINFILLFYKVTEEPLEEETEDVANLWNSFNDEEEEEAMVFFVLQESTGYMAPTLRALAIIHTIISLVCVVGYYCLKVPLVVFKREKEIARKLEFDGLYITEQPSEDDIKGQWDRLVINTPSFPNNYWDKFVKRKVINKYGDLYGAERIAELLGLDKNALDFSPVEETKAEAASLVSWLSSIDMKYHIWKLGVVFTDNSFLYLAWYTTMSVLGHYNNFFFAAHLLDIAMGFKTLRTILSSVTHNGKQLVLTVGLLAVVVYLYTVVAFNFFRKFYNKSEDDDEPDMKCDDMMTCYLFHMYVGVRAGGGIGDEIEDPAGDPYEMYRIVFDITFFFFVIVILLAIIQGLIIDAFGELRDQQEQVREDMETKCFICGIGNDYFDTTPHGFETHTLQEHNLANYLFFLMYLINKDETEHTGQESYVWKMYQERCWDFFPAGDCFRKQYEDQLG

SEQ ID NO: 35187 - protein, 46 aa, Homo sapiens
  REGION 1..46: note = ENSP00000489294
  VARIANT 1: note = Any amino acid
XEDEIQFLRTYIPPDLCVCNFVLEQSLSVRALQEMLANTGENGGEG

SEQ ID NO: 35188 - protein, 1101 aa, Homo sapiens
  REGION 1..1101: note = ENSP00000489672
  VARIANT 1: note = Any amino acid
XGRCAPEMHLIQTGKGEAIRIRSILRSLVPTEDLVGIISIPLKLPSLNKDGSVSEPDMAANFCPDHKAPMVLFLDRVYGIKDQTFLLHLLEVGFLPDLRASASLDTVSLSTTEAALALNRYICSAVLPLLTRCAPLFAGTEHCTSLIDSTLQTIYRLSKGRSLTKAQRDTIEECLLAICNHLRPSMLQQLLRRLVFDVPQLNEYCKMPLKLLTNHYEQCWKYYCLPSGWGSYGLAVEEELHLTEKLFWGIFDSLSHKKYDPDLFRMALPCLSAIAGALPPDYLDTRITATLEKQISVDADGNFDPKPINTMNFSLPEKLEYIVTKYAEHSHDKWACDKSQSGWKYGISLDENVKTHPLIRPFKTLTEKEKEIYRWPARESLKTMLAVGWTVERTKEGEALVQQRENEKLRSVSQANQGNSYSPAPLDLSNVVLSRELQGMVEVVAENYHNIWAKKKKLELESKGGGSHPLLVPYDTLTAKEKFKDREKAQDLFKFLQVNGIIVSRGMKDMELDASSMEKRFAYKFLKKILKYVDSAQEFIAHLEAIVSSGKTEKSPRDQEIKFFAKVLLPLVDQYFTSHCLYFLSSPLKPLSSSGYASHKEKEMVAGLFCKLAALVRHRISLFGSDSTTMVSCLHILAQTLDTRTVMKSGSELVKAGLRAFFENAAEDLEKTSENLKLGKFTHSRTQIKGVSQNINYTTVALLPILTSIFEHVTQHQFGMDLLLGDVQISCYHILCSLYSLGTGKNIYVERQRPALGECLASLAAAIPVAFLEPTLNRYNPLSVFNTKTPRERSILGMPDTVEDMCPDIPQLEGLMKEINDLAESGARYTEMPHVIEVILPMLCNYLSYWWERGPENLPPSTGPCCTKVTSEHLSLILGNILKIINNNLGIDEASWMKRIAVYAQPIISKARPDLLRSHFIPTLEKLKKKAVKTVQEEEQLKADGKGDTQEAELLILDEFAVLCRDLYAFYPMLIRYVDNNRSNWLKSPDADSDQLFRMVAEVFILWCKSHNFKREEQNFVIQNEINNLAFLTGDSKSKMSKAMQVKVQVKCMTCLFCPSIRGAGLWPPLHCDHHGGGREWIFPPGGPPGLLQGRQLPVKE

SEQ ID NO: 35189 - protein, 33 aa, Homo sapiens
  REGION 1..33: note = ENSP00000490438
  VARIANT 1: note = Any amino acid
XQIELLKELLDLLQDMVVMLLSLLEDRFHEPAK

SEQ ID NO: 35190 - protein, 34 aa, Homo sapiens
  REGION 1..34: note = ENSP00000489937
  VARIANT 1: note = Any amino acid
XIELLKELLDLLQDMVVMLLSLLEADRPEEEEED

SEQ ID NO: 35191 - protein, 284 aa, Homo sapiens
  REGION 1..284: note = ENSP00000489832
  VARIANT 1: note = Any amino acid
XLEIAGEEEEDGSLEPASAFAMACASVKRNVTDFLKRATLKNLRKQYRNVKKMTAKELVKVLFSFFWMLFVGLFQLLFTILGGIFQILWSTVFGGGLVEGAKNIRVTKILGDMPDPTQFGIHDDTMEAERAEVMEPGITTELVHFIKGEKGDTDIMSDLFGLHPKKEGSLKHGPEVGLGDLSEIIGKDEPPTLESTVQKKRKAQAAEMKAANEAEGKVESEKADMEDGEKEDKDKEEEQAEYLWTEVTKKKKRRCGQKVEKPEAFTANFFKGLEIYQTKLLPGH

SEQ ID NO: 35192 - protein, 454 aa, Homo sapiens
  REGION 1..454: note = ENSP00000490033
  VARIANT 1: note = Any amino acid
XFVGLFQLLFTILGGIFQILWSTVFGGGLVEGAKNIRVTKILGDMPDPTQFGIHDDTMEAERAEVMEPGITTELVHFIKGEKGDTDIMSDLFGLHPKKEGSLKHGPEVGLGDLSEIIGKDEPPTLESTVQKKRKAQAAEMKAANEAEGKVESEKADMEDGEKEDKDKEEEQAEYLWTEVTKKKKRRCGQKVEKPEAFTANFFKGLEIYQTKLLVTEEPLEEETEDVANLWNSFNDEEEEEAMVFFVLQESTGYMAPTLRALAIIHTIISLVCVVGYYCLKVPLVVFKREKEIARKLEFDGLYITEQPSEDDIKGQWDRLVINTPSFPNNYWDKFVKRKVINKYGDLYGAERIAELLGLDKNALDFSPVEETKAEAASLVSWLSSIDMKYHIWKLGVVFTDNSFLYLAWYTTMSVLGHYNNFFFAAHLLDIAMGFKTLRTILSSVTHNGKQIQTV

SEQ ID NO: 35193 - protein, 615 aa, Homo sapiens
  REGION 1..615: note = ENSP00000489346
RVTKILGDMPDPTQFGIHDDTMEAERAEVMEPGITTELVHFIKGEKGDTDIMSDLFGLHPKKEGSLKHGPEVGLGDLSEIIGKDEPPTLESTVQKKRKAQAAEMKAANEAEGKVESEKADMEDGEKEDKDKEEEQAEYLWTEVTKKKKRRCGQKVEKPEAFTANFFKGLEIYQTKLLVTEEPLEEETEDVANLWNSFNDEEEEEAMVFFVLQESTGYMAPTLRALAIIHTIISLVCVVGYYCLKVPLVVFKREKEIARKLEFDGLYITEQPSEDDIKGQWDRLVINTPSFPNNYWDKFVKRKVINKYGDLYGAERIAELLGLDKNALDFSPVEETKAEAASLVSWLSSIDMKYHIWKLGVVFTDNSFLYLAWYTTMSVLGHYNNFFFAAHLLDIAMGFKTLRTILSSVTHNGKQLVLTVGLLAVVVYLYTVVAFNFFRKFYNKSEDDDEPDMKCDDMMTCYLFHMYVGVRAGGGIGDEIEDPAGDPYEMYRIVFDITFFFFVIVILLAIIQGLIIDAFGELRDQQEQVREDMETKCFICGIGNDYFDTTPHGFETHTLQEHNLANYLFFLMYLINKDETEHTGQESYVWKMYQERCWDFFPAGDCFRKQYEDQLG

SEQ ID NO: 35194 - protein, 468 aa, Homo sapiens
  REGION 1..468: note = ENSP00000490632
  VARIANT 1: note = Any amino acid
XEKPEAFTANFFKGLEIYQTKLLRVCILSQVTEEPLEEETEDVANLWNSFNDEEEEEAMVFFVLQESTGYMAPTLRALAIIHTIISLVCVVGYYCLKVPLVVFKREKEIARKLEFDGLYITEQPSEDDIKGQWDRLVINTPSFPNNYWDKFVKRKVINKYGDLYGAERIAELLGLDKNALDFSPVEETKAEAASLVSWLSSIDMKYHIWKLGVVFTDNSFLYLAWYTTMSVLGHYNNFFFAAHLLDIAMGFKTLRTILSSVTHNGKQLVLTVGLLAVVVYLYTVVAFNFFRKFYNKSEDDDEPDMKCDDMMTCYLFHMYVGVRAGGGIGDEIEDPAGDPYEMYRIVFDITFFFFVIVILLAIIQGLIIDAFGELRDQQEQVREDMETKCFICGIGNDYFDTTPHGFETHTLQEHNLANYLFFLMYLINKDETEHTGQESYVWKMYQERCWDFFPAGDCFRKQYEDQLG

SEQ ID NO: 35195 - protein, 4873 aa, Homo sapiens
  REGION 1..4873: note = ENSP00000483166
MAEGGEGGEDEIQFLRTEDEVVLQCIATIHKEQRKFCLAAEGLGNRLCFLEPTSEAKYIPPDLCVCNFVLEQSLSVRALQEMLANTGENGGEGAAQGGGHRTLLYGHAVLLRHSFSGMYLTCLTTSRSQTDKLAFDVGLREHATGEACWWTIHPASKQRSEGEKVRIGDDLILVSVSSERYLHLSVSNGNIQVDASFMQTLWNVHPTCSGSSIEEGYLLGGHVVRLFHGHDECLTIPSTDQNDSQHRRIFYEAGGAGTRARSLWRVEPLRISWSGSNIRWGQAFRLRHLTTGHYLALTEDQGLILQDRAKSDTKSTAFSFRASKELKEKLDSSHKRDIEGMGVPEIKYGDSVCFVQHIASGLWVTYKAQDAKTSRLGPLKRKVILHQEGHMDDGLTLQRCQREESQAARIIRNTTALFSQFVSGNNRTAAPITLPIEEVLQTLQDLIAYFQPPEEEMRHEDKQNKLRSLKNRQNLFKEEGMLALVLNCIDRLNVYNSVAHFAGIAREESGMAWKEILNLLYKLLAALIRGNRNNCAQFSNNLDWLISKLDRLESSSGILEVLHCILTESPEALNLIAEGHIKSIISLLDKHGRNHKVLDILCSLCLCNGVAVRANQNLICDNLLPRRNLLLQTRLINDVTSIRPNIFLGVAEGSAQYKKWYFELIIDQVDPFLTAEPTHLRVGWASSSGYAPYPGGGEGWGGNGVGDDLYSYGFDGLHLWSGRIPRAVASINQHLLRSDDVVSCCLDLGVPSISFRINGQPVQGMFENFNTDGLFFPVMSFSAGVKVRFLMGGRHGEFKFLPPSGYAPCYEALLPKEKMRLEPVKEYKRDADGIRDLLGTTQFLSQASFIPCPVDTSQVILPPHLEKIRDRLAENIHELWGMNKIELGWTFGKIRDDNKRQHPCLVEFSKLPETEKNYNLQMSTETLKTLLALGCHIAHVNPAAEEDLKKVKLPKNYMMSNGYKPAPLDLSDVKLLPPQEILVDKLAENAHNVWAKDRIKQGWTYGIQQDLKNKRNPRLVPYALLDERTKKSNRDSLREAVRTFVGYGYNIEPSDQELADSAVEKVSIDKIRFFRVERSYAVRSGKWYFEFEVVTGGDMRVGWARPGCRPDVELGADDQAFVFEGNRGQRWHQGSGYFGRTWQPGDVVGCMINLDDASMIFTLNGELLITNKGSELAFADYEIENGFVPICCLGLSQIGRMNLGTDASTFKFYTMCGLQEGFEPFAVNMNRDVAMWFSKRLPTFVNVPKDHPHIEVMRIDGTMDSPPCLKVTHKTFGTQNSNADMIYCRLSMPVECHSSFSHSPCLDSEAFQKRKQMQEILSHTTTQCYYAIRIFAGQDPSCVWVGWVTPDYHLYSEKFDLNKNCTVTVTLGDERGRVHESVKRSNCYMVWGGDIVASSQRSNRSNVDLEIGCLVDLAMGMLSFSANGKELGTCYQVEPNTKVFPAVFLQPTSTSLFQFELGKLKNAMPLSAAIFRSEEKNPVPQCPPRLDVQTIQPVLWSRMPNSFLKVETERVSERHGWVVQCLEPLQMMALHIPEENRCVDILELCEQEDLMRFHYHTLRLYSAVCALGNSRVAYALCSHVDLSQLFYAIDNKYLPGLLRSGFYDLLISIHLASAKERKLMMKNEYIIPITSTTRNIRLFPDESKRHGLPGVGLRTCLKPGFRFSTPCFVVTGEDHQKQSPEIPLESLRTKALSMLTEAVQCSGAHIRDPVGGSVEFQFVPVLKLIGTLLVMGVFDDDDVRQILLLIDPSVFGEHSAGTEEGAEKEEVTQVEEKAVEAGEKAGKEAPVKGLLQTRLPESVKLQMCELLSYLCDCELQHRVEAIVAFGDIYVSKLQANQKFRYNELMQALNMSAALTARKTKEFRSPPQEQINMLLNFQLGENCPCPEEIREELYDFHEDLLLHCGVPLEEEEEEEEDTSWTGKLCALVYKIKGPPKPEKEQPTEEEERCPTTLKELISQTMICWAQEDQIQDSELVRMMFNLLRRQYDSIGELLQALRKTYTISHTSVSDTINLLAALGQIRSLLSVRMGKEEELLMINGLGDIMNNKVFYQHPNLMRVLGMHETVMEVMVNVLGTEKSQIAFPKMVASCCRFLCYFCRISRQNQKAMFEHLSYLLENSSVGLASPSMRGSTPLDVAASSVMDNNELALSLEEPDLEKVVTYLAGCGLQSCPMLLAKGYPDVGWNPIEGERYLSFLRFAVFVNSESVEENASVVVKLLIRRPECFGPALRGEGGNGLLAAMQGAIKISENPALDLPSQGYKREVSTGDDEEEEEIVHMGNAIMSFYSALIDLLGRCAPEMHLIQTGKGEAIRIRSILRSLVPTEDLVGIISIPLKLPSLNKDGSVSEPDMAANFCPDHKAPMVLFLDRVYGIKDQTFLLHLLEVGFLPDLRASASLDTVSLSTTEAALALNRYICSAVLPLLTRCAPLFAGTEHCTSLIDSTLQTIYRLSKGRSLTKAQRDTIEECLLAICNHLRPSMLQQLLRRLVFDVPQLNEYCKMPLKLLTNHYEQCWKYYCLPSGWGSYGLAVEEELHLTEKLFWGIFDSLSHKKYDPDLFRMALPCLSAIAGALPPDYLDTRITATLEKQISVDADGNFDPKPINTMNFSLPEKLEYIVTKYAEHSHDKWACDKSQSGWKYGISLDENVKTHPLIRPFKTLTEKEKEIYRWPARESLKTMLAVGWTVERTKEGEALVQQRENEKLRSVSQANQGNSYSPAPLDLSNVVLSRELQGMVEVVAENYHNIWAKKKKLELESKGGGSHPLLVPYDTLTAKEKFKDREKAQDLFKFLQVNGIIVSRGMKDMELDASSMEKRFAYKFLKKILKYVDSAQEFIAHLEAIVSSGKTEKSPRDQEIKFFAKVLLPLVDQYFTSHCLYFLSSPLKPLSSSGYASHKEKEMVAGLFCKLAALVRHRISLFGNDSTTMVSCLHILAQTLDTRTVMKSGSELVKAGLRAFFENAAEDLEKTSENLKLGKFTHSRTQIKGVSQNINYTTVALLPILTSIFEHVTQHQFGMDLLLGDVQISCYHILCSLYSLGTGKNIYVERQRPALGECLASLAAAIPVAFLEPTLNRYNPLSVFNTKTPRERSILGMPDTVEDMCPDIPQLEGLMKEINDLAESGARYTEMPHVIEVILPMLCNYLSYWWERGPENLPPSTGPCCTKVTSEHLSLILGNILKIINNNLGIDEASWMKRIAVYAQPIISKARPDLLRSHFIPTLEKLKKKAVKTVQEEEQLKADGKGDTQEAELLILDEFAVLCRDLYAFYPMLIRYVDNNRSNWLKSPDADSDQLFRMVAEVFILWCKSHNFKREEQNFVIQNEINNLAFLTGDSKSKMSKAMQVKSGGQDQERKKTKRRGDLYSIQTSLIVAALKKMLPIGLNMCTPGDQELISLAKSRYSHRDTDEEVREHLRNNLHLQEKSDDPAVKWQLNLYKDVLKSEEPFNPEKTVERVQRISAAVFHLEQVEQPLRSKKAVWHKLLSKQRKRAVVACFRMAPLYNLPRQHMHRSINLFLHGYQRFWIETEEYSFEEKLVQDLAKSPKVEEEEEEETEKQPDPLHQIILYFSRNALTERSKLEDDPLYTSYSSMMAKSCQSGEDEEEDEDKEKTFEEKEMEKQKTLYQQARLHERGAAEMVLQMISASKGEMSPMVVETLKLGIAILNGGNAGVQQKMLDYLKEKKDAGFFQSLSGLMQSCSVLDLNAFERQNKAEGLGMVTEEGTLIVRERGEKVLQNDEFTRDLFRFLQLLCEGHNSDFQNFLRTQMGNTTTVNVIISTVDYLLRLQESISDFYWYYSGKDIIDESGQHNFSKALAVTKQIFNSLTEYIQGPCIGNQQSLAHSRLWDAVVGFLHVFANMQMKLSQDSSQIELLKELLDLLQDMVVMLLSLLEGNVVNGTIGKQMVDTLVESSTNVEMILKFFDMFLKLKDLTSSDTFKEYDPDGKGIISKKEFQKAMEGQKQYTQSEIDFLLSCAEADENDMFNYVDFVDRFHEPAKDIGFNVAVLLTNLSEHMPNDSRLKCLLDPAESVLNYFEPYLGRIEIMGGAKKIERVYFEISESSRTQWEKPQVKESKRQFIFDVVNEGGEQEKMELFVNFCEDTIFEMQLASQISESDSADRPEEEEEDEDSSYVLEIAGEEEEDGSLEPASAFAMACASVKRNVTDFLKRATLKNLRKQYRNVKKMTAKELVKVLFSFFWMLFVGLFQLLFTILGGIFQILWSTVFGGGLVEGAKNIRVTKILGDMPDPTQFGIHDDTMEAERAEVMEPGITTELVHFIKGEKGDTDIMSDLFGLHPKKEGSLKHGPEVGLGDLSEIIGKDEPPTLESTVQKKRKAQAAEMKAANEAEGKVESEKADMEDGEKEDKDKEEEQAEYLWTEVTKKKKRRCGQKVEKPEAFTANFFKGLEIYQTKLLHYLARNFYNLRFLALFVAFAINFILLFYKVTEEPLEEETEDVANLWNSFNDEEEEEAMVFFVLQESTGYMAPTLRALAIIHTIISLVCVVGYYCLKVPLVVFKREKEIARKLEFDGLYITEQPSEDDIKGQWDRLVINTPSFPNNYWDKFVKRKVINKYGDLYGAERIAELLGLDKNALDFSPVEETKAEAASLVSWLSSIDMKYHIWKLGVVFTDNSFLYLAWYTTMSVLGHYNNFFFAAHLLDIAMGFKTLRTILSSVTHNGKQLVLTVGLLAVVVYLYTVVAFNFFRKFYNKSEDDDEPDMKCDDMMTCYLFHMYVGVRAGGGIGDEIEDPAGDPYEMYRIVFDITFFFFVIVILLAIIQGLIIDAFGELRDQQEQVREDMETKCFICGIGNDYFDTTPHGFETHTLQEHNLANYLFFLMYLINKDETEHTGQESYVWKMYQERCWDFFPAGDCFRKQYEDQLG

SEQ ID NO: 35196 - protein, 101 aa, Homo sapiens
  REGION 1..101: note = ENSP00000357704
MACPLEKALDVMVSTFHKYSGKEGDKFKLNKSELKELLTRELPSFLGKRTDEAAFQKLMSNLDSNRDNEVDFQEYCVFLSCIAMMCNEFFEGFPDKQPRKK

SEQ ID NO: 35197 - protein, 101 aa, Homo sapiens; identical to SEQ ID NO: 35196
  REGION 1..101: note = ENSP00000346294

SEQ ID NO: 35198 - protein, 101 aa, Homo sapiens; identical to SEQ ID NO: 35196
  REGION 1..101: note = ENSP00000357705

SEQ ID NO: 35199 - protein, 101 aa, Homo sapiens; identical to SEQ ID NO: 35196
  REGION 1..101: note = ENSP00000357703

SEQ ID NO: 35200 - protein, 92 aa, Homo sapiens
  REGION 1..92: note = ENSP00000291700
MSELEKAMVALIDVFHQYSGREGDKHKLKKSELKELINNELSHFLEEIKEQEVVDKVMETLDNDGDGECDFQEFMAFVAMVTTACHEFFEHE

SEQ ID NO: 35201 - protein, 94 aa, Homo sapiens
  REGION 1..94: note = ENSP00000356038
MSELEKAMVALIDVFHQYSGREGDKHKLKKSELKELINNELSHFLERWSLPMLPRLVSNFLCSSYPPALASQSAGITGNQRAGGCGQSHGNTGQ

SEQ ID NO: 35202 - protein, 92 aa, Homo sapiens; identical to SEQ ID NO: 35200
  REGION 1..92: note = ENSP00000380769

SEQ ID NO: 35203 - protein, 382 aa, Homo sapiens
  REGION 1..382: note = ENSP00000305416
MGPTSVPLVKAHRSSVSDYVNYDIIVRHYNYTGKLNISADKENSIKLTSVVFILICCFIILENIFVLLTIWKTKKFHRPMYYFIGNLALSDLLAGVAYTANLLLSGATTYKLTPAQWFLREGSMFVALSASVFSLLAIAIERYITMLKMKLHNGSNNFRLFLLISACWVISLILGGLPIMGWNCISALSSCSTVLPLYHKHYILFCTTVFTLLLLSIVILYCRIYSLVRTRSRRLTFRKNISKASRSSEKSLALLKTVIIVLSVFIACWAPLFILLLLDVGCKVKTCDILFRAEYFLVLAVLNSGTNPIIYTLTNKEMRRAFIRIMSCCKCPSGDSAGKFKRPIIAGMEFSRSKSDNSSHPQKDEGDNPETIMSSGNVNSSS

SEQ ID NO: 35204 - protein, 398 aa, Homo sapiens
  REGION 1..398: note = ENSP00000328472
MESGLLRPAPVSEVIVLHYNYTGKLRGARYQPGAGLRADAVVCLAVCAFIVLENLAVLLVLGRHPRFHAPMFLLLGSLTLSDLLAGAAYAANILLSGPLTLKLSPALWFAREGGVFVALTASVLSLLAIALERSLTMARRGPAPVSSRGRTLAMAAAAWGVSLLLGLLPALGWNCLGRLDACSTVLPLYAKAYVLFCVLAFVGILAAICALYARIYCQVRANARRLPARPGTAGTTSTRARRKPRSLALLRTLSVVLLAFVACWGPLFLLLLLDVACPARTCPVLLQADPFLGLAMANSLLNPIIYTLTNRDLRHALLRLVCCGRHSCGRDPSGSQQSASAAEASGGLRRCLPPGLDGSFSGSERSSPQRDGLDTSGSTGSPGAPTAARTLVSEPAAD

SEQ ID NO: 35205 - protein, 398 aa, Homo sapiens; identical to SEQ ID NO: 35204
  REGION 1..398: note = ENSP00000416915

SEQ ID NO: 35206 - protein, 75 aa, Homo sapiens
  REGION 1..75: note = ENSP00000464884
MCNPVSLYLGSPPPAWPWGARPMESGLLRPAPVSEVIVLHYNYTGKLRGARYQPGAGLRADAVVCLAVCAFIVLE

SEQ ID NO: 35207 - protein, 254 aa, Homo sapiens
  REGION 1..254: note = ENSP00000481239
MESGLLRPAPVSEVIVLHYNYTGKLRGARYQPGAGLRADAVVCLAVCAFIVLENLAVLLVLGRHPRFHAPMFLLLGSLTLSDLARPGTAGTTSTRARRKPRSLALLRTLSVVLLAFVACWGPLFLLLLLDVACPARTCPVLLQADPFLGLAMANSLLNPIIYTLTNRDLRHALLRLVCCGRHSCGRDPSGSQQSASAAEASGGLRRCLPPGLDGSFSGSERSSPQRDGLDTSGSTGSPGAPTAARTLVSEPAAD

SEQ ID NO: 35208 - protein, 1324 aa, Homo sapiens
  REGION 1..1324: note = ENSP00000251020
MSRRKQAKPQHFQSDPEVASLPRRDGDTEKGQPSRPTKSKDAHVCGRCCAEFFELSDLLLHKKNCTKNQLVLIVNENPASPPETFSPSPPPDNPDEQMNDTVNKTDQVDCSDLSEHNGLDREESMEVEAPVANKSGSGTSSGSHSSTAPSSSSSSSSSSGGGGSSSTGTSAITTSLPQLGDLTTLGNFSVINSNVIIENLQSTKVAVAQFSQEARCGGASGGKLAVPALMEQLLALQQQQIHQLQLIEQIRHQILLLASQNADLPTSSSPSQGTLRTSANPLSTLSSHLSQQLAAAAGLAQSLASQSASISGVKQLPPIQLPQSSSGNTIIPSNSGSSPNMNILAAAVTTPSSEKVASSAGASHVSNPAVSSSSSPAFAISSLLSPASNPLLPQQASANSVFPSPLPNIGTTAEDLNSLSALAQQRKSKPPNVTAFEAKSTSDEAFFKHKCRFCAKVFGSDSALQIHLRSHTGERPFKCNICGNRFSTKGNLKVHFQRHKEKYPHIQMNPYPVPEHLDNIPTSTGIPYGMSIPPEKPVTSWLDTKPVLPTLTTSVGLPLPPTLPSLIPFIKTEEPAPIPISHSATSPPGSVKSDSGGPESATRNLGGLPEEAEGSTLPPSGGKSEESGMVTNSVPTASSSVLSSPAADCGPAGSATTFTNPLLPLMSEQFKAKFPFGGLLDSAQASETSKLQQLVENIDKKATDPNECIICHRVLSCQSALKMHYRTHTGERPFKCKICGRAFTTKGNLKTHYSVHRAMPPLRVQHSCPICQKKFTNAVVLQQHIRMHMGGQIPNTPVPDSYSESMESDTGSFDEKNFDDLDNFSDENMEDCPEGSIPDTPKSADASQDSLSSSPLPLEMSSIAALENQMKMINAGLAEQLQASLKSVENGSIEGDVLTNDSSSVGGDMESQSAGSPAISESTSSMQALSPSNSTQEFHKSPSIEEKPQRAVPSEFANGLSPTPVNGGALDLTSSHAEKIIKEDSLGILFPFRDRGKFKNTACDICGKTFACQSALDIHYRSHTKERPFICTVCNRGFSTKGNLKQHMLTHQMRDLPSQLFEPSSNLGPNQNSAVIPANSLSSLIKTEVNGFVHVSPQDSKDTPTSHVPSGPLSSSATSPVLLPALPRRTPKQHYCNTCGKTFSSSSALQIHERTHTGEKPFACTICGRAFTTKGNLKVHMGTHMWNSTPARRGRRLSVDGPMTFLGGNPVKFPEMFQKDLAARSGSGDPSSFWNQYAAALSNGLAMKANEISVIQNGGIPPIPGSLGSGNSSPVSGLTGNLERLQNSEPNAPLAGLEKMASSENGTNFRFTRFVEDSKEIVTS

SEQ ID NO: 35209 - protein, 34 aa, Homo sapiens
  REGION 1..34: note = ENSP00000455582
MSRRKQAKPQHFQSDPEVASLPRRDGTHGHSHVE

SEQ ID NO: 35210 - protein, 1154 aa, Homo sapiens
  REGION 1..1154: note = ENSP00000456777
MNDTVNKTDQVDCSDLSEHNGLDREESMEVEAPVANKSGSGTSSGSHSSTAPSSSSSSSSSSGGGGSSSTGTSAITTSLPQLGDLTTLGNFSVINSNVIIENLQSTKVAVAQFSQEARCGGASGGKLAVPALMEQLLALQQQQIHQLQLIEQIRHQILLLASQNADLPTSSSPSQGTLRTSANPLSTLSSHLSQQLAAAAGLAQSLASQSASISGVKQLPPIQLPQSSSGNTIIPSNSGSSPNMNILAAAVTTPSSEKVASSAGASHVSNPAVSSSSSPAFAISSLLSPASNPLLPQQASANSVFPSPLPNIGTTAEDLNSLSALAQQRKSKPPNVTAFEAKSTSDEAFFKHKCRFCAKVFGSDSALQIHLRSHTGERPFKCNICGNRFSTKGNLKVHFQRHKEKYPHIQMNPYPVPEHLDNIPTSTGIPYGMSIPPEKPVTSWLDTKPVLPTLTTSVGLPLPPTLPSLIPFIKTEEPAPIPISHSATSPPGSVKSDSGGPESATRNLGGLPEEAEGSTLPPSGGKSEESGMVTNSVPTASSSVLSSPAADCGPAGSATTFTNPLLPLMSEQFKAKFPFGGLLDSAQASETSKLQQLVENIDKKATDPNECIICHRVLSCQSALKMHYRTHTGERPFKCKICGRAFTTKGNLKTHYSVHRAMPPLRVQHSCPICQKKFTNAVVLQQHIRMHMGGQIPNTPVPDSYSESMESDTGSFDEKNFDDLDNFSDENMEDCPEGSIPDTPKSADASQDSLSSSPLPLEMSSIAALENQMKMINAGLAEQLQASLKSVENGSIEGDVLTNDSSSVGGDMESQSAGSPAISESTSSMQALSPSNSTQEFHKSPSIEEKPQRAVPSEFANGLSPTPVNGGALDLTSSHAEKIIKEDSLGILFPFRDRGKFKNTACDICGKTFACQSALDIHYRSHTKERPFICTVCNRGFSTKGNLKQHMLTHQMRDLPSQLFEPSSNLGPNQNSAVIPANSLSSLIKTEVNGFVHVSPQDSKDTPTSHVPSGPLSSSATSPVLLPALPRRTPKQHYCNTCGKTFSSSSALQIHERTHTGEKPFACTICGRAFTTKGNLKVHMGTHMWNSTPARRGRRLSVDGPMTFLGGNPVKFPEMFQKDLAARSGSGDPSSFWNQYAAALSNGLAMKANE

SEQ ID NO: 35211 - protein, 1227 aa, Homo sapiens
  REGION 1..1227: note = ENSP00000407914
MNDTVNKTDQVDCSDLSEHNGLDREESMEVEAPVANKSGSGTSSGSHSSTAPSSSSSSSSSSGGGGSSSTGTSAITTSLPQLGDLTTLGNFSVINSNVIIENLQSTKVAVAQFSQEARCGGASGGKLAVPALMEQLLALQQQQIHQLQLIEQIRHQILLLASQNADLPTSSSPSQGTLRTSANPLSTLSSHLSQQLAAAAGLAQSLASQSASISGVKQLPPIQLPQSSSGNTIIPSNSGSSPNMNILAAAVTTPSSEKVASSAGASHVSNPAVSSSSSPAFAISSLLSPASNPLLPQQASANSVFPSPLPNIGTTAEDLNSLSALAQQRKSKPPNVTAFEAKSTSDEAFFKHKCRFCAKVFGSDSALQIHLRSHTGERPFKCNICGNRFSTKGNLKVHFQRHKEKYPHIQMNPYPVPEHLDNIPTSTGIPYGMSIPPEKPVTSWLDTKPVLPTLTTSVGLPLPPTLPSLIPFIKTEEPAPIPISHSATSPPGSVKSDSGGPESATRNLGGLPEEAEGSTLPPSGGKSEESGMVTNSVPTASSSVLSSPAADCGPAGSATTFTNPLLPLMSEQFKAKFPFGGLLDSAQASETSKLQQLVENIDKKATDPNECIICHRVLSCQSALKMHYRTHTGERPFKCKICGRAFTTKGNLKTHYSVHRAMPPLRVQHSCPICQKKFTNAVVLQQHIRMHMGGQIPNTPVPDSYSESMESDTGSFDEKNFDDLDNFSDENMEDCPEGSIPDTPKSADASQDSLSSSPLPLEMSSIAALENQMKMINAGLAEQLQASLKSVENGSIEGDVLTNDSSSVGGDMESQSAGSPAISESTSSMQALSPSNSTQEFHKSPSIEEKPQRAVPSEFANGLSPTPVNGGALDLTSSHAEKIIKEDSLGILFPFRDRGKFKNTACDICGKTFACQSALDIHYRSHTKERPFICTVCNRGFSTKGNLKQHMLTHQMRDLPSQLFEPSSNLGPNQNSAVIPANSLSSLIKTEVNGFVHVSPQDSKDTPTSHVPSGPLSSSATSPVLLPALPRRTPKQHYCNTCGKTFSSSSALQIHERTHTGEKPFACTICGRAFTTKGNLKVHMGTHMWNSTPARRGRRLSVDGPMTFLGGNPVKFPEMFQKDLAARSGSGDPSSFWNQYAAALSNGLAMKANEISVIQNGGIPPIPGSLGSGNSSPVSGLTGNLERLQNSEPNAPLAGLEKMASSENGTNFRFTRFVEDSKEIVTS

SEQ ID NO: 35212 - protein, 148 aa, Homo sapiens
  REGION 1..148: note = ENSP00000402786
  VARIANT 1: note = Any amino acid
XALHCGLNPRGIDHPAHAEGIKLQIEGEGVESQSIKNKNFQKVPDQKGTPKRLQAEAETAKSATVKLSKPVALWTQQDVCKWLKKHCPNQYQIYRRALLRLTDKKLERMGIAQENLRQHILQQVLQLKVREEVRNLQLLTQASSEGSP

SEQ ID NO: 35213 - protein, 153 aa, Homo sapiens
  REGION 1..153: note = ENSP00000435927
GLNPRGIDHPAHAEGIKLQIEGEGVESQSIKNKNFQKVPDQKGTPKRLQAEAETAKSATVKLSKPVALWTQQDVCKWLKKHCPNQYQIYSESFKQHDITGRALLRLTDKKLERMGIAQENLRQHILQQVLQLKVREEVRNLQLLTQASSEGSP

SEQ ID NO: 35214 - protein, 68 aa, Homo sapiens
  REGION 1..68: note = ENSP00000387605
MAVEALHCGLNPRGIDHPAHAEGIKLQIEGEGVESQSIKNKNFQKVPDQKGTPKRLQAEAETAKGEPC

SEQ ID NO: 35215 - protein, 201 aa, Homo sapiens
  REGION 1..201: note = ENSP00000314173
MAVEALHCGLNPRGIDHPAHAEGIKLQIEGEGVESQSIKNKNFQKVPDQKGTPKRLQAEAETAKSATVKLSKPVALWTQQDVCKWLKKHCPNQYQIYSESFKQHDITGRALLRLTDKKLERMGIAQENLRQHILQQVLQLKVREEVRNLQLLTQGTLLLPDGWMDGEIRRKTTLLLGQTGVRENLLLFLHRISIIENSIQI

SEQ ID NO: 35216 - protein, 154 aa, Homo sapiens
  REGION 1..154: note = ENSP00000431360
MAVEALHCGLNPRGIDHPAHAEGIKLQIEGEGVESQSIKNKNFQKVPDQKGTPKRLQAEAETAKSATVKLSKPVALWTQQDVCKWLKKHCPNQYQIYSESFKQHDITGRALLRLTDKKLERMGIAQENLRQHILQQVLQLKVREEVRNLQLLTQ

SEQ ID NO: 35217 - protein, 169 aa, Homo sapiens
  REGION 1..169: note = ENSP00000434079
  VARIANT 1: note = Any amino acid
XALRAPSREPAASLCVTAAALHCGLNPRGIDHPAHAEGIKLQIEGEGVESQSIKNKNFQKVPDQKGTPKRLQAEAETAKSATVKLSKPVALWTQQDVCKWLKKHCPNQYQIYSESFKQHDITGRALLRLTDKKLERMGIAQENLRQHILQQVLQLKVREEVRNLQLLTQ

SEQ ID NO: 35218 - protein, 161 aa, Homo sapiens
  REGION 1..161: note = ENSP00000387133
MAVEALHCGLNPRGIDHPAHAEGIKLQIEGEGVESQSIKNKNFQKVPDQKGTPKRLQAEAETAKSATVKLSKPVALWTQQDVCKWLKKHCPNQYQIYSESFKQHDITGRALLRLTDKKLERMGIAQENLRQHILQQVLQLKVREEVRNLQLLTQASSEGSP

SEQ ID NO: 35219 - protein, 1584 aa, Homo sapiens
  REGION 1..1584: note = ENSP00000326247
MSKQVSLPEMIKDWTKEHVKKWVNEDLKINEQYGQILLSEEVTGLVLQELTEKDLVEMGLPWGPALLIKRSYNKLNSKSPESDNHDPGQLDNSKPSKTEHQKNPKHTKKEEENSMSSNIDYDPREIRDIKQEESILMKENVLDEVANAKHKKKGKLKPEQLTCMPYPFDQFHDSHRYIEHYTLQPETGALNLIDPIHEFKALTNTETATEVDIKMKFSNEVFRFASACMNSRTNGTIHFGVKDKPHGEIVGVKITSKAAFIDHFNVMIKKYFEESEINEAKKCIREPRFVEVLLQNNTPSDRFVIEVDTIPKHSICNDKYFYIQMQICKDKIWKQNQNLSLFVREGASSRDILANSKQRDVDFKAFLQNLKSLVASRKEAEEEYGMKAMKKESEGLKLVKLLIGNRDSLDNSYYDWYILVTNKCHPNQIKHLDFLKEIKWFAVLEFDPESMINGVVKAYKESRVANLHFPNQYEDKTTNMWEKISTLNLYQQPSWIFCNGRSDLKSETYKPLEPHLWQRERASEVRKLILFLTDENIMTRGKFLVVFLLLSSVESPGDPLIETFWAFYQALKGMENMLCISVNSHIYQRWKDLLQTRMKMEDELTNHSISTLNIELVNSTILKLKSVTRSSRRFLPARGSSSVILEKKKEDVLTALEILCENECTETDIEKDKSKFLEFKKSKEEHFYRGGKVSWWNFYFSSENYSSDFVKRDSYEKLKDLIHCWAESPKPIFAKIINLYHHPGCGGTTLAMHVLWDLKKNFRCAVLKNKTTDFAEIAEQVINLVTYRAKSHQDYIPVLLLVDDFEEQENVYFLQNAIHSVLAEKDLRYEKTLVIILNCMRSRNPDESAKLADSIALNYQLSSKEQRAFGAKLKEIEKQHKNCENFYSFMIMKSNFDETYIENVVRNILKGQDVDSKEAQLISFLALLSSYVTDSTISVSQCEIFLGIIYTSTPWEPESLEDKMGTYSTLLIKTEVAEYGRYTGVRIIHPLIALYCLKELERSYHLDKCQIALNILEENLFYDSGIGRDKFQHDVQTLLLTRQRKVYGDETDTLFSPLMEALQNKDIEKVLSAGSRRFPQNAFICQALARHFYIKEKDFNTALDWARQAKMKAPKNSYISDTLGQVYKSEIKWWLDGNKNCRSITVNDLTHLLEAAEKASRAFKESQRQTDSKNYETENWSPQKSQRRYDMYNTACFLGEIEVGLYTIQILQLTPFFHKENELSKKHMVQFLSGKWTIPPDPRNECYLALSKFTSHLKNLQSDLKRCFDFFIDYMVLLKMRYTQKEIAEIMLSKKVSRCFRKYTELFCHLDPCLLQSKESQLLQEENCRKKLEALRADRFAGLLEYLNPNYKDATTMESIVNEYAFLLQQNSKKPMTNEKQNSILANIILSCLKPNSKLIQPLTTLKKQLREVLQFVGLSHQYPGPYFLACLLFWPENQELDQDSKLIEKYVSSLNRSFRGQYKRMCRSKQASTLFYLGKRKGLNSIVHKAKIEQYFDKAQNTNSLWHSGDVWKKNEVKDLLRRLTGQAEGKLISVEYGTEEKIKIPVISVYSGPLRSGRNIERVSFYLGFSIEGPLAYDIEVI

SEQ ID NO: 35220 - protein, 1584 aa, Homo sapiens; identical to SEQ ID NO: 35219
  REGION 1..1584: note = ENSP00000405760

SEQ ID NO: 35221 - protein, 1584 aa, Homo sapiens; identical to SEQ ID NO: 35219
  REGION 1..1584: note = ENSP00000408796

SEQ ID NO: 35222 - protein, 69 aa, Homo sapiens
  REGION 1..69: note = ENSP00000391699
MSKQVSLPEMIKDWTKEHVKKWVNEDLKINEQYGQILLSEEVTGLVLQELTEKDLVEMGLPWGPALLIK

SEQ ID NO: 35223 - protein, 69 aa, Homo sapiens; identical to SEQ ID NO: 35222
  REGION 1..69: note = ENSP00000391387

SEQ ID NO: 35224 - protein, 69 aa, Homo sapiens; identical to SEQ ID NO: 35222
  REGION 1..69: note = ENSP00000396137

SEQ ID NO: 35225 - protein, 69 aa, Homo sapiens; identical to SEQ ID NO: 35222
  REGION 1..69: note = ENSP00000410062

SEQ ID NO: 35226 - protein, 406 aa, Homo sapiens
  REGION 1..406: note = ENSP00000484397
MSKQVSLPEMIKDWTKEHVKKWVNEDLKINEQYGQILLSEEVTGLVLQELTEKDLVEMGLPWGPALLIKRSYNKLNSKSPESDNHDPGQLDNSKPSKTEHQKNPKHTKKEEENSMSSNIDYDPREIRDIKQEESILMKENVLDEVANAKHKKKLEALRADRFAGLLEYLNPNYKDATTMESIVNEYAFLLQQNSKKPMTNEKQNSILANIILSCLKPNSKLIQPLTTLKKQLREVLQFVGLSHQYPGPYFLACLLFWPENQELDQDSKLIEKYVSSLNRSFRGQYKRMCRSKQASTLFYLGKRKGLNSIVHKAKIEQYFDKAQNTNSLWHSGDVWKKNEVKDLLRRLTGQAEGKLISVEYGTEEKIKIPVISVYSGPLRSGRNIERVSFYLGFSIEGPLAYDIEVI

SEQ ID NO: 35227 - protein, 394 aa, Homo sapiens
  REGION 1..394: note = ENSP00000386348
MAGAAMAERGRVPPPAPAPSTEGLPRAFLQSLRTLFDILDDRRRGCVHLREIESRWQGTDARELPRGVLEGLRQVAPASGYLTFERFVAGLRTSLLSADGGPRDPTRAPARPGDQPPPPPQRLVFAPADEPRTVLERKPLPLGVRAPLAGPSAAARSPEQLCAPAEAAPCPAEPERSQSAALEPSSSADAGAVACRALEADSGDARRAPRARGERRRHTIASGVDCGLLKQMKELEQEKEVLLQGLEMMARGRDWYQQQLQRVQERQRRLGQSRASADFGAAGSPRPLGRLLPKVQEVARCLGELLAAACASRALPPSSSGPPCPALTSTSPPVWQQQTILMLKEQNRLLTQEVTEKSERITQLEQEKSALIKQLFEARALSQQDGGPLDSTFI

SEQ ID NO: 35228 - protein, 150 aa, Homo sapiens
  REGION 1..150: note = ENSP00000368553
MAKFVIRPATAADCSDILRLIKELAKYEYMEEQVILTEKGNSTVAGRGTSVRCLSPSPRPLPPLLPLLADLLEDGFGEHPFYHCLVAEVPKEHWTPEGNPSPFPEARETKCYVRSSVGCVEPLTTQAEVTENLDRKNSQQVFKLLRKKKN

SEQ ID NO: 35229 - protein, 120 aa, Homo sapiens
  REGION 1..120: note = ENSP00000368555
MAKFVIRPATAADCSDILRLIKELAKYEYMEEQVILTEKDLLEDGFGEHPFYHCLVAEVPKEHWTPEGNPSPFPEARETKCYVRSSVGCVEPLTTQAEVTENLDRKNSQQVFKLLRKKKN

SEQ ID NO: 35230 - protein, 143 aa, Homo sapiens
  REGION 1..143: note = ENSP00000368556
MAKFVIRPATAADCSDILRLIKELAKYEYMEEQVILTEKGHSIVGFAMYYFTYDPWIGKLLYLEDFFVMSDYRGFGIGSEILKNLSQVAMRCRCSSMHFLVAEWNEPSINFYKRRGASDLSSEEGWRLFKIDKEYLLKMATEE

SEQ ID NO: 35231 - protein, 171 aa, Homo sapiens
  REGION 1..171: note = ENSP00000368572
MAKFVIRPATAADCSDILRLIKELAKYEYMEEQVILTEKDLLEDGFGEHPFYHCLVAEVPKEHWTPEGHSIVGFAMYYFTYDPWIGKLLYLEDFFVMSDYRGFGIGSEILKNLSQVAMRCRCSSMHFLVAEWNEPSINFYKRRGASDLSSEEGWRLFKIDKEYLLKMATEE

SEQ ID NO: 35232 - protein, 250 aa, Homo sapiens
  REGION 1..250: note = ENSP00000246868
MSIFTPTNQIRLTNVAVVRMKRAGKRFEIACYKNKVVGWRSGVEKDLDEVLQTHSVFVNVSKGQVAKKEDLISAFGTDDQTEICKQILTKGEVQVSDKERHTQLEQMFRDIATIVADKCVNPETKRPYTVILIERAMKDIHYSVKTNKSTKQQALEVIKQLKEKMKIERAHMRLRFILPVNEGKKLKEKLKPLIKVIESEDYGQQLEIVCLIDPGCFREIDELIKKETKGKGSLEVLNLKDVEEGDEKFE

SEQ ID NO: 35233 - protein, 86 aa, Homo sapiens
  REGION 1..86: note = ENSP00000394586
MSIFTPTNQIRLTNVAVVRMKRAGKRFEIACYKNKVVGWRSGVEKDLDEVLQTHSVFVNVSKGQVAKKEDLISAFGTDDQTEIYFD

SEQ ID NO: 35234 - protein, 250 aa, Homo sapiens [sequence omitted]

SEQ ID NO: 35235 - protein, 1366 aa, Homo sapiens
  REGION 1..1366: note = ENSP00000354733
MLAVGPAMDRDYPQHEPPPAGSLLYSPPPLQSAMLHCPYWNTFSLPPYPAFSSDSRPFMSSASFLGSQPCPDTSYAPVATASSLPPKTCDFAQDSSYFEDFSNISIFSSSVDSLSDIVDTPDFLPADSLNQVSTIWDDNPAPSTHDKLFQLSRPFAGFEDFLPSHSTPLLVSYQEQSVQSQPEEEDEAEEEEAEELGHTETYADYVPSKSKIGKQHPDRVVETSTLSSVPPPDITYTLALPSDSGALSALQLEAITYACQQHEVLLPSGQRAGFLIGDGAGVGKGRTVAGVILENHLRGRKKALWFSVSNDLKYDAERDLRDIEATGIAVHALSKIKYGDTTTSEGVLFATYSALIGESQAGGQHRTRLRQILDWCGEAFEGVIVFDECHKAKNAGSTKMGKAVLDLQNKLPLARVVYASATGASEPRNMIYMSRLGIWGEGTPFRNFEEFLHAIEKRGVGAMEIVAMDMKVSGMYIARQLSFSGVTFRIEEIPLAPAFECVYNRAALLWAEALNVFQQAADWIGLESRKSLWGQFWSAHQRFFKYLCIAAKVRRLVELAREELARDKCVVIGLQSTGEARTREVLGENDGHLNCFVSAAEGVFLSLIQKHFPSTKRKRDRGAGSKRKRRPRGRGAKAPRLACETAGVIRISDDSSTESDPGLDSDFNSSPESLVDDDVVIVDAVGLPSDDRGPLCLLQRDPHGPGVLERVERLKQDLLDKVRRLGRELPVNTLDELIDQLGGPQRVAEMTGRKGRVVSRPDGTVAFESRAEQGLSIDHVNLREKQRFMSGEKLVAIISEASSSGVSLQADRRVQNQRRRVHMTLELPWSADRAIQQFGRTHRSNQVSAPEYVFLISELAGERRFASIVAKRLESLGALTHGDRRATESRDLSKYNFENKYGTRALHCVLTTILSQTENKVPVPQGYPGGVPTFFRDMKQGLLSVGIGGRESRNGCLDVEKDCSITKFLNRILGLEVHKQNALFQYFSDTFDHLIEMDKREGKYDMGILDLAPGIEEIYEESQQVFLAPGHPQDGQVVFYKISVDRGLKWEDAFAKSLALTGPYDGFYLSYKVRGNKPSCLLAEQNRGQFFTVYKPNIGRQSQLEALDSLRRKFHRVTAEEAKEPWESGYALSLTHCSHSAWNRHCRLAQEGKDCLQGLRLRHHYMLCGALLRVWGRIAAVMADVSSSSYLQIVRLKTKDRKKQVGIKIPEGCVRRVLQELRLMDADVKRRQAPALGCPAPPAPRPLALPCGPGEVLDLTYSPPAEAFPPPPHFSFPAPLSLDAGPGVVPLGTPDAQADPAALAHQGCDINFKEVLEDMLRSLHAGPPSEGALGEGAGAGGAAGGGPERQSVIQFSPPFPGAQAPL

SEQ ID NO: 35236 - protein, 1309 aa, Homo sapiens
  REGION 1..1309: note = ENSP00000400762
MREPLPGSASWGTPGPPSAGTMSQLQLWLQFEALNKDSSYFEDFSNISIFSSSVDSLSDIVDTPDFLPADSLNQVSTIWDDNPAPSTHDKLFQLSRPFAGFEDFLPSHSTPLLVSYQEQSVQSQPEEEDEAEEEEAEELGHTETYADYVPSKSKIGKQHPDRVVETSTLSSVPPPDITYTLALPSDSGALSALQLEAITYACQQHEVLLPSGQRAGFLIGDGAGVGKGRTVAGVILENHLRGRKKALWFSVSNDLKYDAERDLRDIEATGIAVHALSKIKYGDTTTSEGVLFATYSALIGESQAGGQHRTRLRQILDWCGEAFEGVIVFDECHKAKNAGSTKMGKAVLDLQNKLPLARVVYASATGASEPRNMIYMSRLGIWGEGTPFRNFEEFLHAIEKRGVGAMEIVAMDMKVSGMYIARQLSFSGVTFRIEEIPLAPAFECVYNRAALLWAEALNVFQQAADWIGLESRKSLWGQFWSAHQRFFKYLCIAAKVRRLVELAREELARDKCVVIGLQSTGEARTREVLGENDGHLNCFVSAAEGVFLSLIQKHFPSTKRKRDRGAGSKRKRRPRGRGAKAPRLACETAGVIRISDDSSTESDPGLDSDFNSSPESLVDDDVVIVDAVGLPSDDRGPLCLLQRDPHGPGVLERVERLKQDLLDKVRRLGRELPVNTLDELIDQLGGPQRVAEMTGRKGRVVSRPDGTVAFESRAEQGLSIDHVNLREKQRFMSGEKLVAIISEASSSGVSLQADRRVQNQRRRVHMTLELPWSADRAIQQFGRTHRSNQVSAPEYVFLISELAGERRFASIVAKRLESLGALTHGDRRATESRDLSKYNFENKYGTRALHCVLTTILSQTENKVPVPQGYPGGVPTFFRDMKQGLLSVGIGGRESRNGCLDVEKDCSITKFLNRILGLEVHKQNALFQYFSDTFDHLIEMDKREGKYDMGILDLAPGIEEIYEESQQVFLAPGHPQDGQVVFYKISVDRGLKWEDAFAKSLALTGPYDGFYLSYKVRGNKPSCLLAEQNRGQFFTVYKPNIGRQSQLEALDSLRRKFHRVTAEEAKEPWESGYALSLTHCSHSAWNRHCRLAQEGKDCLQGLRLRHHYMLCGALLRVWGRIAAVMADVSSSSYLQIVRLKTKDRKKQVGIKIPEGCVRRVLQELRLMDADVKRRQAPALGCPAPPAPRPLALPCGPGEVLDLTYSPPAEAFPPPPHFSFPAPLSLDAGPGVVPLGTPDAQADPAALAHQGCDINFKEVLEDMLRSLHAGPPSEGALGEGAGAGGAAGGGPERQSVIQFSPPFPGAQAPL

SEQ ID NO: 35237 - protein, 1356 aa, Homo sapiens
  REGION 1..1356: note = ENSP00000468520
MLAVGPAMDRDYPQHEPPPAGSLLYSPPPLQSAMLHCPYWNTFSLPPYPAFSSDSRPFMSSASFLGSQPCPDTSYAPVATASSLPPKTCDFAQDSSYFEDFSNISIFSSSVDSLSDIVDTPDFLPADSLNQVSTIWDDNPAPSTHDKLFQLSRPFAGFEDFLPSHSTPLLVSYQEQSVQSQPEEEDEAEEEEAEELGHTETYADYVPSKSKIGKQHPDRVVETSTLSSVPPPDITYTLALPSDSGALSALQLEAITYACQQHEVLLPSGQRAGFLIGDGAGVGKGRTVAGVILENHLRGRKKALWFSVSNDLKYDAERDLRDIEATGIAVHALSKIKYGDTTTSEGVLFATYSALIGESQAGGQHRTRLRQILDWCGEAFEGVIVFDECHKAKNAGSTKMGKAVLDLQNKLPLARVVYASATGASEPRNMIYMSRLGIWGEGTPFRNFEEFLHAIEKRGVGAMEIVAMDMKVSGMYIARQLSFSGVTFRIEEIPLAPAFECVYNRAALLAADWIGLESRKSLWGQFWSAHQRFFKYLCIAAKVRRLVELAREELARDKCVVIGLQSTGEARTREVLGENDGHLNCFVSAAEGVFLSLIQKHFPSTKRKRDRGAGSKRKRRPRGRGAKAPRLACETAGVIRISDDSSTESDPGLDSDFNSSPESLVDDDVVIVDAVGLPSDDRGPLCLLQRDPHGPGVLERVERLKQDLLDKVRRLGRELPVNTLDELIDQLGGPQRVAEMTGRKGRVVSRPDGTVAFESRAEQGLSIDHVNLREKQRFMSGEKLVAIISEASSSGVSLQADRRVQNQRRRVHMTLELPWSADRAIQQFGRTHRSNQVSAPEYVFLISELAGERRFASIVAKRLESLGALTHGDRRATESRDLSKYNFENKYGTRALHCVLTTILSQTENKVPVPQGYPGGVPTFFRDMKQGLLSVGIGGRESRNGCLDVEKDCSITKFLNRILGLEVHKQNALFQYFSDTFDHLIEMDKREGKYDMGILDLAPGIEEIYEESQQVFLAPGHPQDGQVVFYKISVDRGLKWEDAFAKSLALTGPYDGFYLSYKVRGNKPSCLLAEQNRGQFFTVYKPNIGRQSQLEALDSLRRKFHRVTAEEAKEPWESGYALSLTHCSHSAWNRHCRLAQEGKDCLQGLRLRHHYMLCGALLRVWGRIAAVMADVSSSSYLQIVRLKTKDRKKQVGIKIPEGCVRRVLQELRLMDADVKRRQAPALGCPAPPAPRPLALPCGPGEVLDLTYSPPAEAFPPPPHFSFPAPLSLDAGPGVVPLGTPDAQADPAALAHQGCDINFKEVLEDMLRSLHAGPPSEGALGEGAGAGGAAGGGPERQSVIQFSPPFPGAQAPL

SEQ ID NO: 35238 - protein, 128 aa, Homo sapiens
  REGION 1..128: note = ENSP00000468534
MLAVGPAMDRDYPQHEPPPAGSLLYSPPPLQSAMLHCPYWNTFSLPPYPAFSSDSRPFMSSASFLGSQPCPDTSYAPVATASSLPPKTCDFAQDSSYFEDFSNISIFSSSVDSLSDIVDTPDFLPADS

SEQ ID NO: 35239 - protein, 128 aa, Homo sapiens; identical to SEQ ID NO: 35238
  REGION 1..128: note = ENSP00000466861

SEQ ID NO: 35240 - protein, 111 aa, Homo sapiens
  REGION 1..111: note = ENSP00000468302
MLAVGPAMDRDYPQHEPPPAGSLLYSPPPLQSAMLHCPYWNTFSLPPYPAFSSDSRPFMSSASFLGSQPCPDTSYAPVATASSLPPKTCDFAQDSSYFEDFSNISIFSSSV

SEQ ID NO: 35241 - protein, 1366 aa, Homo sapiens; identical to SEQ ID NO: 35235
  REGION 1..1366: note = ENSP00000488808

SEQ ID NO: 35242 - protein, 1309 aa, Homo sapiens; identical to SEQ ID NO: 35236
  REGION 1..1309: note = ENSP00000482802

SEQ ID NO: 35243 - protein, 1356 aa, Homo sapiens; identical to SEQ ID NO: 35237
  REGION 1..1356: note = ENSP00000488286

SEQ ID NO: 35244 - protein, 128 aa, Homo sapiens; identical to SEQ ID NO: 35238
  REGION 1..128: note = ENSP00000488832

SEQ ID NO: 35245 - protein, 128 aa, Homo sapiens; identical to SEQ ID NO: 35238
  REGION 1..128: note = ENSP00000488079

SEQ ID NO: 35246 - protein, 111 aa, Homo sapiens; identical to SEQ ID NO: 35240
  REGION 1..111: note = ENSP00000488056

SEQ ID NO: 35247 - protein, 1366 aa, Homo sapiens; identical to SEQ ID NO: 35235
  REGION 1..1366: note = ENSP00000477651

SEQ ID NO: 35248 - protein, 45 aa, Homo sapiens
  REGION 1..45: note = ENSP00000457520
MAEKVNNFPPLPKFIPLKPCFYQDFEADIPPQHVSMTKRLYYLWM

SEQ ID NO: 35249 - protein, 235 aa, Homo sapiens
  REGION 1..235: note = ENSP00000406547
MAEKVNNFPPLPKFIPLKPCFYQDFEADIPPQHVSMTKRLYYLWMLNSVTLAVNLVGCLAWLIGGGGATNFGLAFLWLILFTPCSYVCWFRPIYKAFKTDSSFSFMAFFFTFMAQLVISIIQAVGIPGWGVCGWIATISFFGTNIGSAVVMLIPTVMFTVMAVFSFIALSMVHKFYRGSGGSFSKAQEEWTTGAWKNPHVQQAAQNAAMGAAQGAMNQPQTQYSATPNYTYSNEM

SEQ ID NO: 35250 - protein, 116 aa, Homo sapiens
  REGION 1..116: note = ENSP00000456505
MAEKVNNFPPLPKFIPLKPCFYQDFEADIPPQHVSMTKRLYYLWMLNSVTLAVNLVGCLAWLIGGGGATNFGLAFLWLILFTPCSYVCWFRPIYKAFKTDSSFSFMAFFFTFMAQL

SEQ ID NO: 35251 - protein, 97 aa, Homo sapiens
  REGION 1..97: note = ENSP00000456991
MAEKVNNFPPLPKFIPLKPCFYQDFEADIPPQHVSMTKRLYYLWMLNSVTLAVNLVGCLAWLIGGGGATNFGLAFLWLILFTPCSYVCWFRPIYKAF

SEQ ID NO: 35252 - protein, 243 aa, Homo sapiens
  REGION 1..243: note = ENSP00000455313
MAEKVNNFPPLPKFIPLKPCFYQDFEADIPPQHVSMTKRLYYLWMLNSVTLAVNLVGCLAWLIGGGGATNFGLAFLWLILFTPCSYVCWFRPIYKAFKTDSSFSFMAFFFTFMAQLVISIIQAVGIPGWGVCPTLASSCSGWIATISFFGTNIGSAVVMLIPTVMFTVMAVFSFIALSMVHKFYRGSGGSFSKAQEEWTTGAWKNPHVQQAAQNAAMGAAQGAMNQPQTQYSATPNYTYSNEM

SEQ ID NO: 35253 - protein, 123 aa, Homo sapiens
  REGION 1..123: note = ENSP00000454860
MAEKVNNFPPLPKFIPLKPCFYQDFEADIPPQHVSMTKRLYYLWMLNSVTLAVNLVGCLAWLIGGGGATNFGLAFLWLILFTPCSYVCWFRPIYKAFKTDSSFSFMAFFFTFMAQLVISIIQA

SEQ ID NO: 35254 - protein, 45 aa, Homo sapiens; identical to SEQ ID NO: 35248
  REGION 1..45: note = ENSP00000455598

SEQ ID NO: 35255 - protein, 95 aa, Homo sapiens
  REGION 1..95: note = ENSP00000454766
MAEKVNNFPPLPKFIPLKPCFYQDFEADIPPQHVSMTKRLYYLWMLNSVTLAVNLVGCLAWLIGGGGATNFGLAFLWLILFTPCSYVCWFRPIYK

SEQ ID NO: 35256 - protein, 45 aa, Homo sapiens; identical to SEQ ID NO: 35248
  REGION 1..45: note = ENSP00000458072

SEQ ID NO: 35257 - protein, 235 aa, Homo sapiens; identical to SEQ ID NO: 35249
  REGION 1..235: note = ENSP00000355387

SEQ ID NO: 35258 - protein, 46 aa, Homo sapiens
  REGION 1..46: note = ENSP00000457444
MAEKVNNFPPLPKFIPLKPCFYQDFEADIPPQHVSMTKRLYYLWMC

SEQ ID NO: 35259 - protein, 69 aa, Homo sapiens
  REGION 1..69: note = ENSP00000457121
MAEKVNNFPPLPKFIPLKPCFYQDFEADIPPQHVSMTKRLYYLWMLNSVTLAVNLVGCLAWLIGGGGAT

SEQ ID NO: 35260 - protein, 148 aa, Homo sapiens
  REGION 1..148: note = ENSP00000455039
MAEKVNNFPPLPKFIPLKPCFYQDFEADIPPQHVSMTKRLYYLWMLNSVTLAVNLVGCLAWLIGGGGATNFGLAFLWLILFTPCSYVCWFRPIYKAFKTDSSFSFMAFFFTFMAQLVISIIQAVGIPGWGVCGWIATISFFGTNIGSA

SEQ ID NO: 35261 - protein, 45 aa, Homo sapiens; identical to SEQ ID NO: 35248
  REGION 1..45: note = ENSP00000455203

SEQ ID NO: 35262 - protein, 168 aa, Homo sapiens
  REGION 1..168: note = ENSP00000454602
MHLNLEGLGGLEGREALALCPGDGSHLLCRRTDSSFSFMAFFFTFMAQLVISIIQAVGIPGWGVCGWIATISFFGTNIGSAVVMLIPTVMFTVMAVFSFIALSMVHKFYRGSGGSFSKAQEEWTTGAWKNPHVQQAAQNAAMGAAQGAMNQPQTQYSATPNYTYSNEM

SEQ ID NO: 35263 - protein, 466 aa, Homo sapiens
  REGION 1..466: note = ENSP00000337985
MKVRSAGGDGDALCVTEEDLAGDDEDMPTFPCTQKGRPGPRCSRCQKNLSLHTSVRILYLFLALLLVAVAVLASLVFRKVDSLSEDISLTQSIYDKKLVLMQKNLQGLDPKALNNCSFCHEAGQLGPEIRKLQEELEGIQKLLLAQEVQLDQTLQAQEVLSTTSRQISQEMGSCSFSIHQVNQSLGLFLAQVRGWQATTAGLDLSLKDLTQECYDVKAAVHQINFTVGQTSEWIHGIQRKTDEETLTLQKIVTDWQNYTRLFSGLRTTSTKTGEAVKNIQATLGASSQRISQNSESMHDLVLQVMGLQLQLDNISSFLDDHEENMHDLQYHTHYAQNRTVERFESLEGRMASHEIEIGTIFTNINATDNHVHSMLKYLDDVRLSCTLGFHTHAEELYYLNKSVSIMLGTTDLLRERFSLLSARLDLNVRNLSMIVEEMKAVDTQHGEILRNVTILRGHTLFSHNRI

SEQ ID NO: 35264 - protein, 606 aa, Homo sapiens
  REGION 1..606: note = ENSP00000301904
MKVRSAGGDGDALCVTEEDLAGDDEDMPTFPCTQKGRPGPRCSRCQKNLSLHTSVRILYLFLALLLVAVAVLASLVFRKVDSLSEDISLTQSIYDKKLVLMQKNLQGLDPKALNNCSFCHEAGQLGPEIRKLQEELEGIQKLLLAQEVQLDQTLQAQEVLSTTSRQISQEMGSCSFSIHQVNQSLGLFLAQVRGWQATTAGLDLSLKDLTQECYDVKAAVHQINFTVGQTSEWIHGIQRKTDEETLTLQKIVTDWQNYTRLFSGLRTTSTKTGEAVKNIQATLGASSQRISQNSESMHDLVLQVMGLQLQLDNISSFLDDHEENMHDLQYHTHYAQNRTVERFESLEGRMASHEIEIGTIFTNINATDNHVHSMLKYLDDVRLSCTLGFHTHAEELYYLNKSVSIMLGTTDLLRERFSLLSARLDLNVRNLSMIVEEMKAVDTQHGEILRNVTILRGAPGPPGPRGFKGDMGVKGPVGGRGPKGDPGSLGPLGPQGPQGQPGEAGPVGERGPVGPRGFPGLKGSKGSFGTGGPRGQPGPKGDIGPPGPEGPPGSPGPSGPQGKPGIAGKTGSPGQRGAMGPKGEPGIQGPPGLPGPPGPPGSQSFY

SEQ ID NO: 35265 - protein, 283 aa, Homo sapiens
  REGION 1..283: note = ENSP00000432840
MSNVTLRKMSPTGNEMKSTTQGTTRKQQDFHEVNKRRTFLQDNSWIKKRPEEEKDENYGRVVLNRHNSHDALDRKVNERDVPKATISRYSSDDTLDRSMSMFRSLEVTKLQPGGSLNANTSNTIASTSATTPVKKKRQSWFPPPPPGYNASSSTGTRRREPGVHPPIPPKPSSPVSSPNQLRQDNRQIHPPKPGVYTETNRSAERNISEELDNLIKMNKSLNRNQGLDSLFRANPKVEEREKRAKSLESLIYMSTRTDKDGKGIQSLGSPIKVNQRTDKNEKG

SEQ ID NO: 35266 - protein, 668 aa, Homo sapiens
  REGION 1..668: note = ENSP00000366454
MSNVTLRKMSPTGNEMKSTTQGTTRKQQDFHEVNKRRTFLQDNSWIKKRPEEEKDENYGRVVLNRHNSHDALDRKVNERDVPKATISRYSSDDTLDRISDRNDAAKTYKANTLDNQLTNRSMSMFRSLEVTKLQPGGSLNANTSNTIASTSATTPVKKKRQSWFPPPPPGYNASSSTGTRRREPGVHPPIPPKPSSPVSSPNQLRQDNRQIHPPKPGVYTETNRSAERNISEELDNLIKMNKSLNRNQGLDSLFRANPKVEEREKRAKSLESLIYMSTRTDKDGKGIQSLGSPIKVNQRTDKNEKGRQNLESVAKVNARMNKTSRRSEDLDNATEVNPKGHENTTGKKDLDGLIKVDPETNKNITRGQSLDNLIKVTPEVKRSNQGSKDLNNFIKVYPGTEKSTEGGQSLDSLIKVTPERNRTNQGNQDLENLIKVIPSANKSSEQGLDEHINVSPKAVKNTDGKQDLDKLIKVNPEIFTNNQRNQDLANLIKVNPAVIRNNQSQDLDNLIKVKPSALRNTNRDQNLENLIEVNSHVSENKNGSSNTGAKQAGPQDTVVYTRTYVENSKSPKDGYQENISGKYIQTVYSTSDRSVIERDMCTYCRKPLGVETKMILDELQICCHSTCFKCEICKQPLENLQAGDSIWIYRQTIHCEPCYSKIMAKWIP

SEQ ID NO: 35267 - protein, 688 aa, Homo sapiens
  REGION 1..688: note = ENSP00000302579
MSNVTLRKMSPTGNEMKSTTQGTTRKQQDFHEVNKRRTFLQDNSWIKKRPEEEKDENYGRVVLNRHNSHDALDRKVNERDVPKATISRYSSDDTLDRISDRNDAAKTYKANTLDNQLTNRSMSMFRSLEVTKLQPGGSLNANTSNTIASTSATTPVKKKRQSWFPPPPPGYNASSSTGTRRREPGVHPPIPPKPSSPVSSPNQLRQDNRQIHPPKPGVYTETNRSAERNIRSQDLDNIVKVATSLQRSDKGEELDNLIKMNKSLNRNQGLDSLFRANPKVEEREKRAKSLESLIYMSTRTDKDGKGIQSLGSPIKVNQRTDKNEKGRQNLESVAKVNARMNKTSRRSEDLDNATEVNPKGHENTTGKKDLDGLIKVDPETNKNITRGQSLDNLIKVTPEVKRSNQGSKDLNNFIKVYPGTEKSTEGGQSLDSLIKVTPERNRTNQGNQDLENLIKVIPSANKSSEQGLDEHINVSPKAVKNTDGKQDLDKLIKVNPEIFTNNQRNQDLANLIKVNPAVIRNNQSQDLDNLIKVKPSALRNTNRDQNLENLIEVNSHVSENKNGSSNTGAKQAGPQDTVVYTRTYVENSKSPKDGYQENISGKYIQTVYSTSDRSVIERDMCTYCRKPLGVETKMILDELQICCHSTCFKCEICKQPLENLQAGDSIWIYRQTIHCEPCYSKIMAKWIP

SEQ ID NO: 35268 - protein, 646 aa, Homo sapiens
  REGION 1..646: note = ENSP00000437895
MSNVTLRKMSPTGNEMKSTTQGTTRKQQDFHEVNKRRTFLQDNSWIKKRPEEEKDENYGRVVLNRHNSHDALDRKVNERDVPKATISRYSSDDTLDRISDRNDAAKTYKANTLDNQLTNRSMSMFRSLEVTKLQPGGSLNANTSNTIASTSATTPVKKKREPGVHPPIPPKPSSPVSSPNQLRQDNRQIHPPKPGVYTETNRSAERNIRSQDLDNIVKVATSLQRSDKGEELDNLIKMNKSLNRNQGLDSLFRANPKVEEREKRAKSLESLIYMSTRTDKDGKGIQSLGSPIKVNQRTDKNEKGRQNLESVAKVNARMNKTSRRSEDLDNATEVNPKGHENTTGGQSLDNLIKVTPEVKRSNQGSKDLNNFIKVYPGTEKSTEGGQSLDSLIKVTPERNRTNQGNQDLENLIKVIPSANKSSEQGLDEHINVSPKAVKNTDGKQDLDKLIKVNPEIFTNNQRNQDLANLIKVNPAVIRNNQSQDLDNLIKVKPSALRNTNRDQNLENLIEVNSHVSENKNGSSNTGAKQAGPQDTVVYTRTYVENSKSPKDGYQENISGKYIQTVYSTSDRSVIERDMCTYCRKPLGVETKMILDELQICCHSTCFKCEICKQPLENLQAGDSIWIYRQTIHCEPCYSKIMAKWIP

SEQ ID NO: 35269 - protein, 468 aa, Homo sapiens
  REGION 1..468: note = ENSP00000220478
MGFLGTGTWILVLVLPIQAFPKPGGSQDKSLHNRELSAERPLNEQIAEAEEDKIKKTYPPENKPGQSNYSFVDNLNLLKAITEKEKIEKERQSIRSSPLDNKLNVEDVDSTKNRKLIDDYDSTKSGLDHKFQDDPDGLHQLDGTPLTAEDIVHKIAARIYEENDRAVFDKIVSKLLNLGLITESQAHTLEDEVAEVLQKLISKEANNYEEDPNKPTSWTENQAGKIPEKVTPMAAIQDGLAKGENDETVSNTLTLTNGLERRTKTYSEDNFEELQYFPNFYALLKSIDSEKEAKEKETLITIMKTLIDFVKMMVKYGTISPEEGVSYLENLDEMIALQTKNKLEKNATDNISKLFPAPSEKSHEETDSTKEEAAKMEKEYGSLKDSTKDDNSNPGGKTDEPKGKTEAYLEAIRKNIEWLKKHDKKGNKEDYDLSKMRDFINKQADAYVEKGILDKEEAEAIKRIYSSL

SEQ ID NO: 35270 - protein, 236 aa, Homo sapiens
  REGION 1..236: note = ENSP00000445205
MAAIQDGLAKGENDETVSNTLTLTNGLERRTKTYSEDNFEELQYFPNFYALLKSIDSEKEAKEKETLITIMKTLIDFVKMMVKYGTISPEEGVSYLENLDEMIALQTKNKLEKNATDNISKLFPAPSEKSHEETDSTKEEAAKMEKEYGSLKDSTKDDNSNPGGKTDEPKGKTEAYLEAIRKNIEWLKKHDKKGNKEDYDLSKMRDFINKQADAYVEKGILDKEEAEAIKRIYSSL

SEQ ID NO: 35271 - protein, 57 aa, Homo sapiens
  REGION 1..57: note = ENSP00000452745
MAAIQDGLAKGENDETVSNTLTLTNGLERRTKTYSEDNFEELQYFPNFYALLKSIDS

SEQ ID NO: 35272 - protein, 276 aa, Homo sapiens
  REGION 1..276: note = ENSP00000367197
MDSSREPTLGRLDAAGFWQVWQRFDADEKGYIEEKELDAFFLHMLMKLGTDDTVMKANLHKVKQQFMTTQDASKDGRIRMKELAGMFLSEDENFLLLFRRENPLDSSVEFMQIWRKYDADSSGFISAAELRNFLRDLFLHHKKAISEAKLEEYTGTMMKIFDRNKDGRLDLNDLARILALQENFLLQFKMDACSTEERKRDFEKIFAYYDVSKTGALEGPEVDGFVKDMMELVQPSISGVDLDKFREILLRHCDVNKDGKIQKSELALCLGLKINP

SEQ ID NO: 35273 - protein, 49 aa, Homo sapiens
  REGION 1..49: note = ENSP00000484392
MDSSREPTLGRLDAAGFWQVWQRFDADGHGHESKFAQGETAVYDYPRCL

SEQ ID NO: 35274 - protein, 49 aa, Homo sapiens; identical to SEQ ID NO: 35273
  REGION 1..49: note = ENSP00000333933

SEQ ID NO: 35275 - protein, 149 aa, Homo sapiens
  REGION 1..149: note = ENSP00000493054
MEQTVLVPPGPDSFNFFTRESLAAIERRIAEEKAKNPKPDKKDDDENGPKPNSDLEAGKNLPFIYGDIPPEMVSEPLEDLDPYYINKKTFIVLNKGKAIFRFSATSALYILTPFNPLRKIAIKILVHSYIIQHANYVHYFDKLCVYDNE

SEQ ID NO: 35276 - protein, 1997 aa, Homo sapiens
  REGION 1..1997: note = ENSP00000492917
MEQTVLVPPGPDSFNFFTRESLAAIERRIAEEKAKNPKPDKKDDDENGPKPNSDLEAGKNLPFIYGDIPPEMVSEPLEDLDPYYINKKTFIVLNKGKAIFRFSATSALYILTPFNPLRKIAIKILVHSLFSMLIMCTILTNCVFMTMSNPPDWTKNVEYTFTGIYTFESLIKIIARGFCLEDFTFLRDPWNWLDFTVITFAYVTEFVDLGNVSALRTFRVLRALKTISVIPGLKTIVGALIQSVKKLSDVMILTVFCLSVFALIGLQLFMGNLRNKCIQWPPTNASLEEHSIEKNITVNYNGTLINETVFEFDWKSYIQDSRYHYFLEGFLDALLCGNSSDAGQCPEGYMCVKAGRNPNYGYTSFDTFSWAFLSLFRLMTQDFWENLYQLTLRAAGKTYMIFFVLVIFLGSFYLINLILAVVAMAYEEQNQATLEEAEQKEAEFQQMIEQLKKQQEAAQAATATASEHSREPSAAGRLSDSSSEASKLSSKSAKERRNRRKKRKQKEQSGGEEKDEDEFQKSESEDSIRRKGFRFSIEGNRLTYEKRYSSPHQSLLSIRGSLFSPRRNSRTSLFSFRGRAKDVGSENDFADDEHSTFEDNESRRDSLFVPRRHGERRNSNLSQTSRSSRMLAVFPANGKMHSTVDCNGVVSLVGGPSVPTSPVGQLLPEGTTTETEMRKRRSSSFHVSMDFLEDPSQRQRAMSIASILTNTVEELEESRQKCPPCWYKFSNIFLIWDCSPYWLKVKHVVNLVVMDPFVDLAITICIVLNTLFMAMEHYPMTDHFNNVLTVGNLVFTGIFTAEMFLKIIAMDPYYYFQEGWNIFDGFIVTLSLVELGLANVEGLSVLRSFRLLRVFKLAKSWPTLNMLIKIIGNSVGALGNLTLVLAIIVFIFAVVGMQLFGKSYKDCVCKIASDCQLPRWHMNDFFHSFLIVFRVLCGEWIETMWDCMEVAGQAMCLTVFMMVMVIGNLVVLNLFLALLLSSFSADNLAATDDDNEMNNLQIAVDRMHKGVAYVKRKIYEFIQQSFIRKQKILDEIKPLDDLNNKKDSCMSNHTAEIGKDLDYLKDVNGTTSGIGTGSSVEKYIIDESDYMSFINNPSLTVTVPIAVGESDFENLNTEDFSSESDLEESKEKLNESSSSSEGSTVDIGAPVEEQPVVEPEETLEPEACFTEGCVQRFKCCQINVEEGRGKQWWNLRRTCFRIVEHNWFETFIVFMILLSSGALAFEDIYIDQRKTIKTMLEYADKVFTYIFILEMLLKWVAYGYQTYFTNAWCWLDFLIVDVSLVSLTANALGYSELGAIKSLRTLRALRPLRALSRFEGMRVVVNALLGAIPSIMNVLLVCLIFWLIFSIMGVNLFAGKFYHCINTTTGDRFDIEDVNNHTDCLKLIERNETARWKNVKVNFDNVGFGYLSLLQVATFKGWMDIMYAAVDSRNVELQPKYEESLYMYLYFVIFIIFGSFFTLNLFIGVIIDNFNQQKKKFGGQDIFMTEEQKKYYNAMKKLGSKKPQKPIPRPGNKFQGMVFDFVTRQVFDISIMILICLNMVTMMVETDDQSEYVTTILSRINLVFIVLFTGECVLKLISLRHYYFTIGWNIFDFVVVILSIVGMFLAELIEKYFVSPTLFRVIRLARIGRILRLIKGAKGIRTLLFALMMSLPALFNIGLLLFLVMFIYAIFGMSNFAYVKREVGIDDMFNFETFGNSMICLFQITTSAGWDGLLAPILNSKPPDCDPNKVNPGSSVKGDCGNPSVGIFFFVSYIIISFLVVVNMYIAVILENFSVATEESAEPLSEDDFEMFYEVWEKFDPDATQFMEFEKLSQFAAALEPPLNLPQPNKLQLIAMDLPMVSGDRIHCLDILFAFTKRVLGESGEMDALRIQMEERFMASNPSKVSYQPITTTLKRKQEEVSAVIIQRAYRRHLLKRTVKQASFTYNKNKIKGGANLLIKEDMIIDRINENSITEKTDLTMSTAACPPSYDRVTKPIVEKHEQEGKDEKAKGK

SEQ ID NO: 35277 - protein, 1915 aa, Homo sapiens
  REGION 1..1915: note = ENSP00000492945
MEQTVLVPPGPDSFNFFTRESLAAIERRIAEEKAKNPKPDKKDDDENGPKPNSDLEAGKNLPFIYGDIPPEMVSEPLEDLDPYYINKKTFIVLNKGKAIFRFSATSALYILTPFNPLRKIAIKILVHSLFSMLIMCTILTNCVFMTMSNPPDWTKNVEYTFTGIYTFESLIKIIARGFCLEDFTFLRDPWNWLDFTVITFAYVTEFVDLGNVSALRTFRVLRALKTISVIPGLKTIVGALIQSVKKLSDVMILTVFCLSVFALIGLQLFMGNLRNKCIQWPPTNASLEEHSIEKNITVNYNGTLINETVFEFDWKSYIQDSRYHYFLEGFLDALLCGNSSDAGQCPEGYMCVKAGRNPNYGYTSFDTFSWAFLSLFRLMTQDFWENLYQLTLRAAGKTYMIFFVLVIFLGSFYLINLILAVVAMAYEEQNQATLEEAEQKEAEFQQMIEQLKKQQEAAQQAATATASEHSREPSAAGRLSDSSSEASKLSSKSAKERRNRRKKRKQKEQSGGEEKDEDEFQKSESEDSIRRKGFRFSIEGNRLTYEKRYSSPHQSLLSIRGSLFSPRRNSRTSLFSFRGRAKDVGSENDFADDEHSTFEDNESRRDSLFVPRRHGERRNSNLSQTSRSSRMLAVFPANGKMHSTVDCNGVVSLVGGPSVPTSPVGQLLPEVIIDKPATDDNGTTTETEMRKRRSSSFHVSMDFLEDPSQRQRAMSIASILTNTVEELEESRQKCPPCWYKFSNIFLIWDCSPYWLKVKHVVNLVVMDPFVDLAITICIVLNTLFMAMEHYPMTDHFNNVLTVGNLVFTGIFTAEMFLKIIAMDPYYYFQEGWNIFDGFIVTLSLVELGLANVEGLSVLRSFRLLRVFKLAKSWPTLNMLIKIIGNSVGALGNLTLVLAIIVFIFAVVGMQLFGKSYKDCVCKIASDCQLPRWHMNDFFHSFLIVFRVLCGEWIETMWDCMEVAGQAMCLTVFMMVMVIGNLVVLNLFLALLLSSFSADNLAATDDDNEMNNLQIAVDRMHKGVAYVKRKIYEFIQQSFIRKQKILDEIKPLDDLNNKKDSCMSNHTAEIGKDLDYLKDVNGTTSGIGTGSSVEKYIIDESDYMSFINNPSLTVTVPIAVGESDFENLNTEDFSSESDLEESKEKLNESSSSSEGSTVDIGAPVEEQPVVEPEETLEPEACFTEGCVQRFKCCQINVEEGRGKQWWNLRRTCFRIVEHNWFETFIVFMILLSSGALAFEDIYIDQRKTIKTMLEYADKVFTYIFILEMLLKWVAYGYQTYFTNAWCWLDFLIVDVSLVSLTANALGYSELGAIKSLRTLRALRPLRALSRFEGMRATFKGWMDIMYAAVDSRNVELQPKYEESLYMYLYFVIFIIFGSFFTLNLFIGVIIDNFNQQKKKFGGQDIFMTEEQKKYYNAMKKLGSKKPQKPIPRPGNKFQGMVFDFVTRQVFDISIMILICLNMVTMMVETDDQSEYVTTILSRINLVFIVLFTGECVLKLISLRHYYFTIGWNIFDFVVVILSIVGMFLAELIEKYFVSPTLFRVIRLARIGRILRLIKGAKGIRTLLFALMMSLPALFNIGLLLFLVMFIYAIFGMSNFAYVKREVGIDDMFNFETFGNSMICLFQITTSAGWDGLLAPILNSKPPDCDPNKVNPGSSVKGDCGNPSVGIFFFVSYIIISFLVVVNMYIAVILENFSVATEESAEPLSEDDFEMFYEVWEKFDPDATQFMEFEKLSQFAAALEPPLNLPQPNKLQLIAMDLPMVSGDRIHCLDILFAFTKRVLGESGEMDALRIQMEERFMASNPSKVSYQPITTTLKRKQEEVSAVIIQRAYRRHLLKRTVKQASFTYNKNKIKGGANLLIKEDMIIDRINENSITEKTDLTMSTAACPPSYDRVTKPIVEKHEQEGKDEKAKGK

SEQ ID NO: 35278 - protein, 1998 aa, Homo sapiens
  REGION 1..1998: note = ENSP00000491573
MEQTVLVPPGPDSFNFFTRESLAAIERRIAEEKAKNPKPDKKDDDENGPKPNSDLEAGKNLPFIYGDIPPEMVSEPLEDLDPYYINKKTFIVLNKGKAIFRFSATSALYILTPFNPLRKIAIKILVHSLFSMLIMCTILTNCVFMTMSNPPDWTKNVEYTFTGIYTFESLIKIIARGFCLEDFTFLRDPWNWLDFTVITFAFVTEFVNLGNFSALRTFRVLRALKTISVIPGLKTIVGALIQSVKKLSDVMILTVFCLSVFALIGLQLFMGNLRNKCIQWPPTNASLEEHSIEKNITVNYNGTLINETVFEFDWKSYIQDSRYHYFLEGFLDALLCGNSSDAGQCPEGYMCVKAGRNPNYGYTSFDTFSWAFLSLFRLMTQDFWENLYQLTLRAAGKTYMIFFVLVIFLGSFYLINLILAVVAMAYEEQNQATLEEAEQKEAEFQQMIEQLKKQQEAAQQAATATASEHSREPSAAGRLSDSSSEASKLSSKSAKERRNRRKKRKQKEQSGGEEKDEDEFQKSESEDSIRRKGFRFSIEGNRLTYEKRYSSPHQSLLSIRGSLFSPRRNSRTSLFSFRGRAKDVGSENDFADDEHSTFEDNESRRDSLFVPRRHGERRNSNLSQTSRSSRMLAVFPANGKMHSTVDCNGVVSLVGGPSVPTSPVGQLLPEGTTTETEMRKRRSSSFHVSMDFLEDPSQRQRAMSIASILTNTVEELEESRQKCPPCWYKFSNIFLIWDCSPYWLKVKHVVNLVVMDPFVDLAITICIVLNTLFMAMEHYPMTDHFNNVLTVGNLVFTGIFTAEMFLKIIAMDPYYYFQEGWNIFDGFIVTLSLVELGLANVEGLSVLRSFRLLRVFKLAKSWPTLNMLIKIIGNSVGALGNLTLVLAIIVFIFAVVGMQLFGKSYKDCVCKIASDCQLPRWHMNDFFHSFLIVFRVLCGEWIETMWDCMEVAGQAMCLTVFMMVMVIGNLVVLNLFLALLLSSFSADNLAATDDDNEMNNLQIAVDRMHKGVAYVKRKIYEFIQQSFIRKQKILDEIKPLDDLNNKKDSCMSNHTAEIGKDLDYLKDVNGTTSGIGTGSSVEKYIIDESDYMSFINNPSLTVTVPIAVGESDFENLNTEDFSSESDLEESKEKLNESSSSSEGSTVDIGAPVEEQPVVEPEETLEPEACFTEGCVQRFKCCQINVEEGRGKQWWNLRRTCFRIVEHNWFETFIVFMILLSSGALAFEDIYIDQRKTIKTMLEYADKVFTYIFILEMLLKWVAYGYQTYFTNAWCWLDFLIVDVSLVSLTANALGYSELGAIKSLRTLRALRPLRALSRFEGMRVVVNALLGAIPSIMNVLLVCLIFWLIFSIMGVNLFAGKFYHCINTTTGDRFDIEDVNNHTDCLKLIERNETARWKNVKVNFDNVGFGYLSLLQVATFKGWMDIMYAAVDSRNVELQPKYEESLYMYLYFVIFIIFGSFFTLNLFIGVIIDNFNQQKKKFGGQDIFMTEEQKKYYNAMKKLGSKKPQKPIPRPGNKFQGMVFDFVTRQVFDISIMILICLNMVTMMVETDDQSEYVTTILSRINLVFIVLFTGECVLKLISLRHYYFTIGWNIFDFVVVILSIVGMFLAELIEKYFVSPTLFRVIRLARIGRILRLIKGAKGIRTLLFALMMSLPALFNIGLLLFLVMFIYAIFGMSNFAYVKREVGIDDMFNFETFGNSMICLFQITTSAGWDGLLAPILNSKPPDCDPNKVNPGSSVKGDCGNPSVGIFFFVSYIIISFLVVVNMYIAVILENFSVATEESAEPLSEDDFEMFYEVWEKFDPDATQFMEFEKLSQFAAALEPPLNLPQPNKLQLIAMDLPMVSGDRIHCLDILFAFTKRVLGESGEMDALRIQMEERFMASNPSKVSYQPITTTLKRKQEEVSAVIIQRAYRRHLLKRTVKQASFTYNKNKIKGGANLLIKEDMIIDRINENSITEKTDLTMSTAACPPSYDRVTKPIVEKHEQEGKDEKAKGK

SEQ ID NO: 35279 - protein, 1998 aa, Homo sapiens
  REGION 1..1998: note = ENSP00000490780
MEQTVLVPPGPDSFNFFTRESLAAIERRIAEEKAKNPKPDKKDDDENGPKPNSDLEAGKNLPFIYGDIPPEMVSEPLEDLDPYYINKKTFIVLNKGKAIFRFSATSALYILTPFNPLRKIAIKILVHSLFSMLIMCTILTNCVFMTMSNPPDWTKNVEYTFTGIYTFESLIKIIARGFCLEDFTFLRDPWNWLDFTVITFAYVTEFVDLGNVSALRTFRVLRALKTISVIPGLKTIVGALIQSVKKLSDVMILTVFCLSVFALIGLQLFMGNLRNKCIQWPPTNASLEEHSIEKNITVNYNGTLINETVFEFDWKSYIQDSRYHYFLEGFLDALLCGNSSDAGQCPEGYMCVKAGRNPNYGYTSFDTFSWAFLSLFRLMTQDFWENLYQLTLRAAGKTYMIFFVLVIFLGSFYLINLILAVVAMAYEEQNQATLEEAEQKEAEFQQMIEQLKKQQEAAQQAATATASEHSREPSAAGRLSDSSSEASKLSSKSAKERRNRRKKRKQKEQSGGEEKDEDEFQKSESEDSIRRKGFRFSIEGNRLTYEKRYSSPHQSLLSIRGSLFSPRRNSRTSLFSFRGRAKDVGSENDFADDEHSTFEDNESRRDSLFVPRRHGERRNSNLSQTSRSSRMLAVFPANGKMHSTVDCNGVVSLVGGPSVPTSPVGQLLPEGTTTETEMRKRRSSSFHVSMDFLEDPSQRQRAMSIASILTNTVEELEESRQKCPPCWYKFSNIFLIWDCSPYWLKVKHVVNLVVMDPFVDLAITICIVLNTLFMAMEHYPMTDHFNNVLTVGNLVFTGIFTAEMFLKIIAMDPYYYFQEGWNIFDGFIVTLSLVELGLANVEGLSVLRSFRLLRVFKLAKSWPTLNMLIKIIGNSVGALGNLTLVLAIIVFIFAVVGMQLFGKSYKDCVCKIASDCQLPRWHMNDFFHSFLIVFRVLCGEWIETMWDCMEVAGQAMCLTVFMMVMVIGNLVVLNLFLALLLSSFSADNLAATDDDNEMNNLQIAVDRMHKGVAYVKRKIYEFIQQSFIRKQKILDEIKPLDDLNNKKDSCMSNHTAEIGKDLDYLKDVNGTTSGIGTGSSVEKYIIDESDYMSFINNPSLTVTVPIAVGESDFENLNTEDFSSESDLEESKEKLNESSSSSEGSTVDIGAPVEEQPVVEPEETLEPEACFTEGCVQRFKCCQINVEEGRGKQWWNLRRTCFRIVEHNWFETFIVFMILLSSGALAFEDIYIDQRKTIKTMLEYADKVFTYIFILEMLLKWVAYGYQTYFTNAWCWLDFLIVDVSLVSLTANALGYSELGAIKSLRTLRALRPLRALSRFEGMRVVVNALLGAIPSIMNVLLVCLIFWLIFSIMGVNLFAGKFYHCINTTTGDRFDIEDVNNHTDCLKLIERNETARWKNVKVNFDNVGFGYLSLLQVATFKGWMDIMYAAVDSRNVELQPKYEESLYMYLYFVIFIIFGSFFTLNLFIGVIIDNFNQQKKKFGGQDIFMTEEQKKYYNAMKKLGSKKPQKPIPRPGNKFQGMVFDFVTRQVFDISIMILICLNMVTMMVETDDQSEYVTTILSRINLVFIVLFTGECVLKLISLRHYYFTIGWNIFDFVVVILSIVGMFLAELIEKYFVSPTLFRVIRLARIGRILRLIKGAKGIRTLLFALMMSLPALFNIGLLLFLVMFIYAIFGMSNFAYVKREVGIDDMFNFETFGNSMICLFQITTSAGWDGLLAPILNSKPPDCDPNKVNPGSSVKGDCGNPSVGIFFFVSYIIISFLVVVNMYIAVILENFSVATEESAEPLSEDDFEMFYEVWEKFDPDATQFMEFEKLSQFAAALEPPLNLPQPNKLQLIAMDLPMVSGDRIHCLDILFAFTKRVLGESGEMDALRIQMEERFMASNPSKVSYQPITTTLKRKQEEVSAVIIQRAYRRHLLKRTVKQASFTYNKNKIKGGANLLIKEDMIIDRINENSITEKTDLTMSTAACPPSYDRVTKPIVEKHEQEGKDEKAKGK

SEQ ID NO: 35280 - protein, 1618 aa, Homo sapiens
  REGION 1..1618: note = ENSP00000490692
MEQTVLVPPGPDSFNFFTRESLAAIERRIAEEKAKNPKPDKKDDDENGPKPNSDLEAGKNLPFIYGDIPPEMVSEPLEDLDPYYINKKTFIVLNKGKAIFRFSATSALYILTPFNPLRKIAIKILVHSLFSMLIMCTILTNCVFMTMSNPPDWTKNVEYTFTGIYTFESLIKIIARGFCLEDFTFLRDPWNWLDFTVITFAYVTEFVDLGNVSALRTFRVLRALKTISVIPGLKTIVGALIQSVKKLSDVMILTVFCLSVFALIGLQLFMGNLRNKCIQWPPTNASLEEHSIEKNITVNYNGTLINETVFEFDWKSYIQDSRYHYFLEGFLDALLCGNSSDAGQCPEGYMCVKAGRNPNYGYTSFDTFSWAFLSLFRLMTQDFWENLYQLTLRAAGKTYMIFFVLVIFLGSFYLINLILAVVAMAYEEQNQATLEEAEQKEAEFQQMIEQLKKQQEAAQQAATATASEHSREPSAAGRLSDSSSEASKLSSKSAKERRNRRKKRKQKEQSGGEEKDEDEFQKSESEDSIRRKGFRFSIEGNRLTYEKRYSSPHQSLLSIRGSLFSPRRNSRTSLFSFRGRAKDVGSENDFADDEHSTFEDNESRRDSLFVPRRHGERRNSNLSQTSRSSRMLAVFPANGKMHSTVDCNGVVSLVGGPSVPTSPVGQLLPEGTTTETEMRKRRSSSFHVSMDFLEDPSQRQRAMSIASILTNTVEELEESRQKCPPCWYKFSNIFLIWDCSPYWLKVKHVVNLVVMDPFVDLAITICIVLNTLFMAMEHYPMTDHFNNVLTVGNLVFTGIFTAEMFLKIIAMDPYYYFQEGWNIFDGFIVTLSLVELGLANVEGLSVLRSFRLLRVFKLAKSWPTLNMLIKIIGNSVGALGNLTLVLAIIVFIFAVVGMQLFGKSYKDCVCKIASDCQLPRWHMNDFFHSFLIVFRVLCGEWIETMWDCMEVAGQAMCLTVFMMVMVIGNLVVLNLFLALLLSSFSADNLAATDDDNEMNNLQIAVDRMHKGVAYVKRKIYEFIQQSFIRKQKILDEIKPLDDLNNKKDSCMSNHTAEIGKDLDYLKDVNGTTSGIGTGSSVEKYIIDESDYMSFINNPSLTVTVPIAVGESDFENLNTEDFSSESDLEESKEKLNESSSSSEGSTVDIGAPVEEQPVVEPEETLEPEACFTEGCVQRFKCCQINVEEGRGKQWWNLRRTCFRIVEHNWFETFIVFMILLSSGALAFEDIYIDQRKTIKTMLEYADKVFTYIFILEMLLKWVAYGYQTYFTNAWCWLDFLIVDVSLVSLTANALGYSELGAIKSLRTLRALRPLRALSRFEGMRVVVNALLGAIPSIMNVLLVCLIFWLIFSIMGVNLFAGKFYHCINTTTGDRFDIEDVNNHTDCLKLIERNETARWKNVKVNFDNVGFGYLSLLQVATFKGWMDIMYAAVDSRNVELQPKYEESLYMYLYFVIFIIFGSFFTLNLFIGVIIDNFNQQKKKFGGQDIFMTEEQKKYYNAMKKLGSKKPQKPIPRPGNKFQGMVFDFVTRQVFDISIMILICLNMVTMMVETDDQSEYVTTILSRINLVFIVLFTGECVLKLISLRHYYFTIGWNIFDFVVVILSIVGKKYLKFLNSVK

SEQ ID NO: 35281 - protein, 829 aa, Homo sapiens
  REGION 1..829: note = ENSP00000490288
MEQTVLVPPGPDSFNFFTRESLAAIERRIAEEKAKNPKPDKKDDDENGPKPNSDLEAGKNLPFIYGDIPPEMVSEPLEDLDPYYINKKTFIVLNKGKAIFRFSATSALYILTPFNPLRKIAIKILVHSLFSMLIMCTILTNCVFMTMSNPPDWTKNVEYTFTGIYTFESLIKIIARGFCLEDFTFLRDPWNWLDFTVITFAYVTEFVDLGNVSALRTFRVLRALKTISVIPGLKTIVGALIQSVKKLSDVMILTVFCLSVFALIGLQLFMGNLRNKCIQWPPTNASLEEHSIEKNITVNYNGTLINETVFEFDWKSYIQDSRYHYFLEGFLDALLCGNSSDAGQCPEGYMCVKAGRNPNYGYTSFDTFSWAFLSLFRLMTQDFWENLYQLTLRAAGKTYMIFFVLVIFLGSFYLINLILAVVAMAYEEQNQATLEEAEQKEAEFQQMIEQLKKQQEAAQQAATATASEHSREPSAAGRLSDSSSEASKLSSKSAKERRNRRKKRKQKEQSGGEEKDEDEFQKSESEDSIRRKGFRFSIEGNRLTYEKRYSSPHQSLLSIRGSLFSPRRNSRTSLFSFRGRAKDVGSENDFADDEHSTFEDNESRRDSLFVPRRHGERRNSNLSQTSRSSRMLAVFPANGKMHSTVDCNGVVSLVGGPSVPTSPVGQLLPEGTTTETEMRKRRSSSFHVSMDFLEDPSQRQRAMSIASILTNTVEELEESRQKCPPCWYKFSNIFLIWDCSPYWLKVKHVVNLVVMDPFVDLAITICIVLNTLFMAMEHYPMTDHFNNVLTVGNLVSILEGFHWDLYSRNVSENYCHGSLLLFPRRLEYL

SEQ ID NO: 35282 - protein, 2009 aa, Homo sapiens
  REGION 1..2009: note = ENSP00000303540
MEQTVLVPPGPDSFNFFTRESLAAIERRIAEEKAKNPKPDKKDDDENGPKPNSDLEAGKNLPFIYGDIPPEMVSEPLEDLDPYYINKKTFIVLNKGKAIFRFSATSALYILTPFNPLRKIAIKILVHSLFSMLIMCTILTNCVFMTMSNPPDWTKNVEYTFTGIYTFESLIKIIARGFCLEDFTFLRDPWNWLDFTVITFAYVTEFVDLGNVSALRTFRVLRALKTISVIPGLKTIVGALIQSVKKLSDVMILTVFCLSVFALIGLQLFMGNLRNKCIQWPPTNASLEEHSIEKNITVNYNGTLINETVFEFDWKSYIQDSRYHYFLEGFLDALLCGNSSDAGQCPEGYMCVKAGRNPNYGYTSFDTFSWAFLSLFRLMTQDFWENLYQLTLRAAGKTYMIFFVLVIFLGSFYLINLILAVVAMAYEEQNQATLEEAEQKEAEFQQMIEQLKKQQEAAQQAATATASEHSREPSAAGRLSDSSSEASKLSSKSAKERRNRRKKRKQKEQSGGEEKDEDEFQKSESEDSIRRKGFRFSIEGNRLTYEKRYSSPHQSLLSIRGSLFSPRRNSRTSLFSFRGRAKDVGSENDFADDEHSTFEDNESRRDSLFVPRRHGERRNSNLSQTSRSSRMLAVFPANGKMHSTVDCNGVVSLVGGPSVPTSPVGQLLPEVIIDKPATDDNGTTTETEMRKRRSSSFHVSMDFLEDPSQRQRAMSIASILTNTVEELEESRQKCPPCWYKFSNIFLIWDCSPYWLKVKHVVNLVVMDPFVDLAITICIVLNTLFMAMEHYPMTDHFNNVLTVGNLVFTGIFTAEMFLKIIAMDPYYYFQEGWNIFDGFIVTLSLVELGLANVEGLSVLRSFRLLRVFKLAKSWPTLNMLIKIIGNSVGALGNLTLVLAIIVFIFAVVGMQLFGKSYKDCVCKIASDCQLPRWHMNDFFHSFLIVFRVLCGEWIETMWDCMEVAGQAMCLTVFMMVMVIGNLVVLNLFLALLLSSFSADNLAATDDDNEMNNLQIAVDRMHKGVAYVKRKIYEFIQQSFIRKQKILDEIKPLDDLNNKKDSCMSNHTAEIGKDLDYLKDVNGTTSGIGTGSSVEKYIIDESDYMSFINNPSLTVTVPIAVGESDFENLNTEDFSSESDLEESKEKLNESSSSSEGSTVDIGAPVEEQPVVEPEETLEPEACFTEGCVQRFKCCQINVEEGRGKQWWNLRRTCFRIVEHNWFETFIVFMILLSSGALAFEDIYIDQRKTIKTMLEYADKVFTYIFILEMLLKWVAYGYQTYFTNAWCWLDFLIVDVSLVSLTANALGYSELGAIKSLRTLRALRPLRALSRFEGMRVVVNALLGAIPSIMNVLLVCLIFWLIFSIMGVNLFAGKFYHCINTTTGDRFDIEDVNNHTDCLKLIERNETARWKNVKVNFDNVGFGYLSLLQVATFKGWMDIMYAAVDSRNVELQPKYEESLYMYLYFVIFIIFGSFFTLNLFIGVIIDNFNQQKKKFGGQDIFMTEEQKKYYNAMKKLGSKKPQKPIPRPGNKFQGMVFDFVTRQVFDISIMILICLNMVTMMVETDDQSEYVTTILSRINLVFIVLFTGECVLKLISLRHYYFTIGWNIFDFVVVILSIVGMFLAELIEKYFVSPTLFRVIRLARIGRILRLIKGAKGIRTLLFALMMSLPALFNIGLLLFLVMFIYAIFGMSNFAYVKREVGIDDMFNFETFGNSMICLFQITTSAGWDGLLAPILNSKPPDCDPNKVNPGSSVKGDCGNPSVGIFFFVSYIIISFLVVVNMYIAVILENFSVATEESAEPLSEDDFEMFYEVWEKFDPDATQFMEFEKLSQFAAALEPPLNLPQPNKLQLIAMDLPMVSGDRIHCLDILFAFTKRVLGESGEMDALRIQMEERFMASNPSKVSYQPITTTLKRKQEEVSAVIIQRAYRRHLLKRTVKQASFTYNKNKIKGGANLLIKEDMIIDRINENSITEKTDLTMSTAACPPSYDRVTKPIVEKHEQEGKDEKAKGK

SEQ ID NO: 35283 - protein, 1998 aa, Homo sapiens; identical to SEQ ID NO: 35279
  REGION 1..1998: note = ENSP00000490799

SEQ ID NO: 35284 - protein, 1998 aa, Homo sapiens; identical to SEQ ID NO: 35279
  REGION 1..1998: note = ENSP00000364554

SEQ ID NO: 35285 - protein, 331 aa, Homo sapiens
  REGION 1..331: note = ENSP00000490184
  VARIANT 1: note = Any amino acid
XIGKDLDYLKDVNGTTSGIGTGSSVEKYIIDESDYMSFINNPSLTVTVPIAVGESDFENLNTEDFSSESDLEESKEKLNESSSSSEGSTVDIGAPVEEQPVVEPEETLEPEACFTEGCVQRFKCCQINVEEGRGKQWWNLRRTCFRIVEHNWFETFIVFMILLSSGALAFEDIYIDQRKTIKTMLEYADKVFTYIFILEMLLKWVAYGYQTYFTNAWCWLDFLIVDVSLVSLTANALGYSELGAIKSLRTLRALRPLRALSRFEGMRDNLAPTWMGWSAGSSPEPFIMGGCECPFRSNSIHHECASGLSYILANFQHHGRKFVCWQILPLY

SEQ ID NO: 35286 - protein, 1981 aa, Homo sapiens
  REGION 1..1981: note = ENSP00000386312
MEQTVLVPPGPDSFNFFTRESLAAIERRIAEEKAKNPKPDKKDDDENGPKPNSDLEAGKNLPFIYGDIPPEMVSEPLEDLDPYYINKKTFIVLNKGKAIFRFSATSALYILTPFNPLRKIAIKILVHSLFSMLIMCTILTNCVFMTMSNPPDWTKNVEYTFTGIYTFESLIKIIARGFCLEDFTFLRDPWNWLDFTVITFAYVTEFVDLGNVSALRTFRVLRALKTISVIPGLKTIVGALIQSVKKLSDVMILTVFCLSVFALIGLQLFMGNLRNKCIQWPPTNASLEEHSIEKNITVNYNGTLINETVFEFDWKSYIQDSRYHYFLEGFLDALLCGNSSDAGQCPEGYMCVKAGRNPNYGYTSFDTFSWAFLSLFRLMTQDFWENLYQLTLRAAGKTYMIFFVLVIFLGSFYLINLILAVVAMAYEEQNQATLEEAEQKEAEFQQMIEQLKKQQEAAQQAATATASEHSREPSAAGRLSDSSSEASKLSSKSAKERRNRRKKRKQKEQSGGEEKDEDEFQKSESEDSIRRKGFRFSIEGNRLTYEKRYSSPHQSLLSIRGSLFSPRRNSRTSLFSFRGRAKDVGSENDFADDEHSTFEDNESRRDSLFVPRRHGERRNSNLSQTSRSSRMLAVFPANGKMHSTVDCNGVVSLGTTTETEMRKRRSSSFHVSMDFLEDPSQRQRAMSIASILTNTVEELEESRQKCPPCWYKFSNIFLIWDCSPYWLKVKHVVNLVVMDPFVDLAITICIVLNTLFMAMEHYPMTDHFNNVLTVGNLVFTGIFTAEMFLKIIAMDPYYYFQEGWNIFDGFIVTLSLVELGLANVEGLSVLRSFRLLRVFKLAKSWPTLNMLIKIIGNSVGALGNLTLVLAIIVFIFAVVGMQLFGKSYKDCVCKIASDCQLPRWHMNDFFHSFLIVFRVLCGEWIETMWDCMEVAGQAMCLTVFMMVMVIGNLVVLNLFLALLLSSFSADNLAATDDDNEMNNLQIAVDRMHKGVAYVKRKIYEFIQQSFIRKQKILDEIKPLDDLNNKKDSCMSNHTAEIGKDLDYLKDVNGTTSGIGTGSSVEKYIIDESDYMSFINNPSLTVTVPIAVGESDFENLNTEDFSSESDLEESKEKLNESSSSSEGSTVDIGAPVEEQPVVEPEETLEPEACFTEGCVQRFKCCQINVEEGRGKQWWNLRRTCFRIVEHNWFETFIVFMILLSSGALAFEDIYIDQRKTIKTMLEYADKVFTYIFILEMLLKWVAYGYQTYFTNAWCWLDFLIVDVSLVSLTANALGYSELGAIKSLRTLRALRPLRALSRFEGMRVVVNALLGAIPSIMNVLLVCLIFWLIFSIMGVNLFAGKFYHCINTTTGDRFDIEDVNNHTDCLKLIERNETARWKNVKVNFDNVGFGYLSLLQVATFKGWMDIMYAAVDSRNVELQPKYEESLYMYLYFVIFIIFGSFFTLNLFIGVIIDNFNQQKKKFGGQDIFMTEEQKKYYNAMKKLGSKKPQKPIPRPGNKFQGMVFDFVTRQVFDISIMILICLNMVTMMVETDDQSEYVTTILSRINLVFIVLFTGECVLKLISLRHYYFTIGWNIFDFVVVILSIVGMFLAELIEKYFVSPTLFRVIRLARIGRILRLIKGAKGIRTLLFALMMSLPALFNIGLLLFLVMFIYAIFGMSNFAYVKREVGIDDMFNFETFGNSMICLFQITTSAGWDGLLAPILNSKPPDCDPNKVNPGSSVKGDCGNPSVGIFFFVSYIIISFLVVVNMYIAVILENFSVATEESAEPLSEDDFEMFYEVWEKFDPDATQFMEFEKLSQFAAALEPPLNLPQPNKLQLIAMDLPMVSGDRIHCLDILFAFTKRVLGESGEMDALRIQMEERFMASNPSKVSYQPITTTLKRKQEEVSAVIIQRAYRRHLLKRTVKQASFTYNKNKIKGGANLLIKEDMIIDRINENSITEKTDLTMSTAACPPSYDRVTKPIVEKHEQEGKDEKAKGK

SEQ ID NO: 35287 - protein, 30 aa, Homo sapiens
  REGION 1..30: note = ENSP00000489986
SLLQVATFKGWMDIMYAAVDSRNPLSGSKT

SEQ ID NO: 35288 - protein, 145 aa, Homo sapiens
  REGION 1..145: note = ENSP00000490895
MEQTVLVPPGPDSFNFFTRESLAAIERRIAEEKAKNPKPDKKDDDENGPKPNSDLEAGKNLPFIYGDIPPEMVSEPLEDLDPYYINKKMEFCSHHPGWSAVARSWLTATSASWVQAILLFSCLSLPSNWDYRDPPPGPANFFVCF

SEQ ID NO: 35289 - skipped

SEQ ID NO: 35290 - protein, 2009 aa, Homo sapiens; identical to SEQ ID NO: 35282
  REGION 1..2009: note = ENSP00000407030

SEQ ID NO: 35291 - protein, 731 aa, Homo sapiens
  REGION 1..731: note = ENSP00000490765
MAQSVLVPPGPDSFRFFTRESLAAIEQRIAEEKAKRPKQERKDEDDENGPKPNSDLEAGKSLPFIYGDIPPEMVSVPLEDLDPYYINKKTFIVLNKGKAISRFSATPALYILTPFNPIRKLAIKILVHSLFNMLIMCTILTNCVFMTMSNPPDWTKNVEYTFTGIYTFESLIKILARGFCLEDFTFLRDPWNWLDFTVITFAYVTEFVDLGNVSALRTFRVLRALKTISVIPGLKTIVGALIQSVKKLSDVMILTVFCLSVFALIGLQLFMGNLRNKCLQWPPDNSSFEINITSFFNNSLDGNGTTFNRTVSIFNWDEYIEDKSHFYFLEGQNDALLCGNSSDAGQCPEGYICVKAGRNPNYGYTSFDTFSWAFLSLFRLMTQDFWENLYQLTLRAAGKTYMIFFVLVIFLGSFYLINLILAVVAMAYEEQNQATLEEAEQKEAEFQQMLEQLKKQQEEAQAAAAAASAESRDFSGAGGIGVFSESSSVASKLSSKSEKELKNRRKKKKQKEQSGEEEKNDRVRKSESEDSIRRKGFRFSLEGSRLTYEKRFSSPHQSLLSIRGSLFSPRRNSRASLFSFRGRAKDIGSENDFADDEHSTFEDNDSRRDSLFVPHRHGERRHSNVSQASRASRVLPILPMNGKMHSAVDCNGVVSLVGGPSTLTSAGQLLPEGTTTETEIRKRRSSSYHVSMDLLEDPTSRQRAMSIASILTNTMEDFFFLYLASRKLLQM

SEQ ID NO: 35292 - protein, 505 aa, Homo sapiens
  REGION 1..505: note = ENSP00000406454
MAQSVLVPPGPDSFRFFTRESLAAIEQRIAEEKAKRPKQERKDEDDENGPKPNSDLEAGKSLPFIYGDIPPEMVSVPLEDLDPYYINKKTFIVLNKGKAISRFSATPALYILTPFNPIRKLAIKILVHSLFNMLIMCTILTNCVFMTMSNPPDWTKNVEYTFTGIYTFESLIKILARGFCLEDFTFLRDPWNWLDFTVITFAYVTEFVDLGNVSALRTFRVLRALKTISVIPGLKTIVGALIQSVKKLSDVMILTVFCLSVFALIGLQLFMGNLRNKCLQWPPDNSSFEINITSFFNNSLDGNGTTFNRTVSIFNWDEYIEDKSHFYFLEGQNDALLCGNSSDAGQCPEGYICVKAGRNPNYGYTSFDTFSWAFLSLFRLMTQDFWENLYQLTLRAAGKTYMIFFVLVIFLGSFYLINLILAVVAMAYEEQNQATLEEAEQKEAEFQQMLEQLKKQQEEAQAAAAAASAESRDFSGAGGIGVFSESSSVASKLSSKSEKELKNRR

SEQ ID NO: 35293 - protein, 2005 aa, Homo sapiens
  REGION 1..2005: note = ENSP00000490107
MAQSVLVPPGPDSFRFFTRESLAAIEQRIAEEKAKRPKQERKDEDDENGPKPNSDLEAGKSLPFIYGDIPPEMVSVPLEDLDPYYINKKTFIVLNKGKAISRFSATPALYILTPFNPIRKLAIKILVHSLFNMLIMCTILTNCVFMTMSNPPDWTKNVEYTFTGIYTFESLIKILARGFCLEDFTFLRDPWNWLDFTVITFAYVTEFVNLGNVSALRTFRVLRALKTISVIPGLKTIVGALIQSVKKLSDVMILTVFCLSVFALIGLQLFMGNLRNKCLQWPPDNSSFEINITSFFNNSLDGNGTTFNRTVSIFNWDEYIEDKSHFYFLEGQNDALLCGNSSDAGQCPEGYICVKAGRNPNYGYTSFDTFSWAFLSLFRLMTQDFWENLYQLTLRAAGKTYMIFFVLVIFLGSFYLINLILAVVAMAYEEQNQATLEEAEQKEAEFQQMLEQLKKQQEEAQAAAAAASAESRDFSGAGGIGVFSESSSVASKLSSKSEKELKNRRKKKKQKEQSGEEEKNDRVRKSESEDSIRRKGFRFSLEGSRLTYEKRFSSPHQSLLSIRGSLFSPRRNSRASLFSFRGRAKDIGSENDFADDEHSTFEDNDSRRDSLFVPHRHGERRHSNVSQASRASRVLPILPMNGKMHSAVDCNGVVSLVGGPSTLTSAGQLLPEGTTTETEIRKRRSSSYHVSMDLLEDPTSRQRAMSIASILTNTMEELEESRQKCPPCWYKFANMCLIWDCCKPWLKVKHLVNLVVMDPFVDLAITICIVLNTLFMAMEHYPMTEQFSSVLSVGNLVFTGIFTAEMFLKIIAMDPYYYFQEGWNIFDGFIVSLSLMELGLANVEGLSVLRSFRLLRVFKLAKSWPTLNMLIKIIGNSVGALGNLTLVLAIIVFIFAVVGMQLFGKSYKECVCKISNDCELPRWHMHDFFHSFLIVFRVLCGEWIETMWDCMEVAGQTMCLTVFMMVMVIGNLVVLNLFLALLLSSFSSDNLAATDDDNEMNNLQIAVGRMQKGIDFVKRKIREFIQKAFVRKQKALDEIKPLEDLNNKKDSCISNHTTIEIGKDLNYLKDGNGTTSGIGSSVEKYVVDESDYMSFINNPSLTVTVPIAVGESDFENLNTEEFSSESDMEESKEKLNATSSSEGSTVDIGAPAEGEQPEVEPEESLEPEACFTEDCVRKFKCCQISIEEGKGKLWWNLRKTCYKIVEHNWFETFIVFMILLSSGALAFEDIYIEQRKTIKTMLEYADKVFTYIFILEMLLKWVAYGFQVYFTNAWCWLDFLIVDVSLVSLTANALGYSELGAIKSLRTLRALRPLRALSRFEGMRVVVNALLGAIPSIMNVLLVCLIFWLIFSIMGVNLFAGKFYHCINYTTGEMFDVSVVNNYSECKALIESNQTARWKNVKVNFDNVGLGYLSLLQVATFKGWMDIMYAAVDSRNVELQPKYEDNLYMYLYFVIFIIFGSFFTLNLFIGVIIDNFNQQKKKFGGQDIFMTEEQKKYYNAMKKLGSKKPQKPIPRPANKFQGMVFDFVTKQVFDISIMILICLNMVTMMVETDDQSQEMTNILYWINLVFIVLFTGECVLKLISLRYYYFTIGWNIFDFVVVILSIVGMFLAELIEKYFVSPTLFRVIRLARIGRILRLIKGAKGIRTLLFALMMSLPALFNIGLLLFLVMFIYAIFGMSNFAYVKREVGIDDMFNFETFGNSMICLFQITTSAGWDGLLAPILNSGPPDCDPDKDHPGSSVKGDCGNPSVGIFFFVSYIIISFLVVVNMYIAVILENFSVATEESAEPLSEDDFEMFYEVWEKFDPDATQFIEFAKLSDFADALDPPLLIAKPNKVQLIAMDLPMVSGDRIHCLDILFAFTKRVLGESGEMDALRIQMEERFMASNPSKVSYEPITTTLKRKQEEVSAIIIQRAYRRYLLKQKVKKVSSIYKKDKGKECDGTPIKEDTLIDKLNENSTPEKTDMTPSTTSPPSYDSVTKPEKEKFEKDKSEKEDKGKDIRESKK

SEQ ID NO: 35294 - protein, 92 aa, Homo sapiens
  REGION 1..92: note = ENSP00000490592
MAQSVLVPPGPDSFRFFTRESLAAIEQRIAEEKAKRPKQERKDEDDENGPKPNSDLEAGKSLPFIYGDIPPEMVSVPLEDLDPYYINKKVSS

SEQ ID NO: 35295 - protein, 1873 aa, Homo sapiens
  REGION 1..1873: note = ENSP00000490849
MLIMCTILTNCVFMTMSNPPDWTKNVEYTFTGIYTFESLIKILARGFCLEDFTFLRDPWNWLDFTVITFAYVTEFVDLGNVSALRTFRVLRALKTISVIPGLKTIVGALIQSVKKLSDVMILTVFCLSVFALIGLQLFMGNLRNKCLQWPPDNSSFEINITSFFNNSLDGNGTTFNRTVSIFNWDEYIEDKSHFYFLEGQNDALLCGNSSDAGQCPEGYICVKAGRNPNYGYTSFDTFSWAFLSLFRLMTQDFWENLYQLTLRAAGKTYMIFFVLVIFLGSFYLINLILAVVAMAYEEQNQATLEEAEQKEAEFQQMLEQLKKQQEEAQAAAAAASAESRDFSGAGGIGVFSESSSVASKLSSKSEKELKNRRKKKKQKEQSGEEEKNDRVRKSESEDSIRRKGFRFSLEGSRLTYEKRFSSPHQSLLSIRGSLFSPRRNSRASLFSFRGRAKDIGSENDFADDEHSTFEDNDSRRDSLFVPHRHGERRHSNVSQASRASRVLPILPMNGKMHSAVDCNGVVSLVGGPSTLTSAGQLLPEGTTTETEIRKRRSSSYHVSMDLLEDPTSRQRAMSIASILTNTMEELEESRQKCPPCWYKFANMCLIWDCCKPWLKVKHLVNLVVMDPFVDLAITICIVLNTLFMAMEHYPMTEQFSSVLSVGNLVFTGIFTAEMFLKIIAMDPYYYFQEGWNIFDGFIVSLSLMELGLANVEGLSVLRSFRLLRVFKLAKSWPTLNMLIKIIGNSVGALGNLTLVLAIIVFIFAVVGMQLFGKSYKECVCKISNDCELPRWHMHDFFHSFLIVFRVLCGEWIETMWDCMEVAGQTMCLTVFMMVMVIGNLVVLNLFLALLLSSFSSDNLAATDDDNEMNNLQIAVGRMQKGIDFVKRKIREFIQKAFVRKQKALDEIKPLEDLNNKKDSCISNHTTIEIGKDLNYLKDGNGTTSGIGSSVEKYVVDESDYMSFINNPSLTVTVPIAVGESDFENLNTEEFSSESDMEESKEKLNATSSSEGSTVDIGAPAEGEQPEVEPEESLEPEACFTEDCVRKFKCCQISIEEGKGKLWWNLRKTCYKIVEHNWFETFIVFMILLSSGALAFEDIYIEQRKTIKTMLEYADKVFTYIFILEMLLKWVAYGFQVYFTNAWCWLDFLIVDVSLVSLTANALGYSELGAIKSLRTLRALRPLRALSRFEGMRVVVNALLGAIPSIMNVLLVCLIFWLIFSIMGVNLFAGKFYHCINYTTGEMFDVSVVNNYSECKALIESNQTARWKNVKVNFDNVGLGYLSLLQVATFKGWMDIMYAAVDSRNVELQPKYEDNLYMYLYFVIFIIFGSFFTLNLFIGVIIDNFNQQKKKFGGQDIFMTEEQKKYYNAMKKLGSKKPQKPIPRPANKFQGMVFDFVTKQVFDISIMILICLNMVTMMVETDDQSQEMTNILYWINLVFIVLFTGECVLKLISLRYYYFTIGWNIFDFVVVILSIVGMFLAELIEKYFVSPTLFRVIRLARIGRILRLIKGAKGIRTLLFALMMSLPALFNIGLLLFLVMFIYAIFGMSNFAYVKREVGIDDMFNFETFGNSMICLFQITTSAGWDGLLAPILNSGPPDCDPDKDHPGSSVKGDCGNPSVGIFFFVSYIIISFLVVVNMYIAVILENFSVATEESAEPLSEDDFEMFYEVWEKFDPDATQFIEFAKLSDFADALDPPLLIAKPNKVQLIAMDLPMVSGDRIHCLDILFAFTKRVLGESGEMDALRIQMEERFMASNPSKVSYEPITTTLKRKQEEVSAIIIQRAYRRYLLKQKVKKVSSIYKKDKGKECDGTPIKEDTLIDKLNENSTPEKTDMTPSTTSPPSYDSVTKPEKEKFEKDKSEKEDKGKDIRESKK

SEQ ID NO: 35296 - protein, 2005 aa, Homo sapiens; identical to SEQ ID NO: 35293
  REGION 1..2005: note = ENSP00000486885

SEQ ID NO: 35297 - protein, 558 aa, Homo sapiens
  REGION 1..558: note = ENSP00000489821
MAQSVLVPPGPDSFRFFTRESLAAIEQRIAEEKAKRPKQERKDEDDENGPKPNSDLEAGKSLPFIYGDIPPEMVSVPLEDLDPYYINKKTFIVLNKGKAISRFSATPALYILTPFNPIRKLAIKILVHSLFNMLIMCTILTNCVFMTMSNPPDWTKNVEYVTEFVDLGNVSALRTFRVLRALKTISVIPGLKTIVGALIQSVKKLSDVMILTVFCLSVFALIGLQLFMGNLRNKCLQWPPDNSSFEINITSFFNNSLDGNGTTFNRTVSIFNWDEYIEDKSHFYFLEGQNDALLCGNSSDAGQCPEGYICVKAGRNPNYGYTSFDTFSWAFLSLFRLMTQDFWENLYQLTLRAAGKTYMIFFVLVIFLGSFYLINLILAVVAMAYEEQNQATLEEAEQKEAEFQQMLEQLKKQQEEAQAAAAAASAESRDFSGAGGIGVFSESSSVASKLSSKSEKELKNRRKKKKQKEQSGEEEKNDRVRKSESEDSIRRKGFRFSLEGSRLTYEKRFSSPHQVTLMQEVGSLGLQQLHPCHFAGYSFPPDYFHGLALNVCGFSSPY

SEQ ID NO: 35298 - protein, 2005 aa, Homo sapiens
  REGION 1..2005: note = ENSP00000490866
MAQSVLVPPGPDSFRFFTRESLAAIEQRIAEEKAKRPKQERKDEDDENGPKPNSDLEAGKSLPFIYGDIPPEMVSVPLEDLDPYYINKKTFIVLNKGKAISRFSATPALYILTPFNPIRKLAIKILVHSLFNMLIMCTILTNCVFMTMSNPPDWTKNVEYTFTGIYTFESLIKILARGFCLEDFTFLRDPWNWLDFTVITFAYVTEFVDLGNVSALRTFRVLRALKTISVIPGLKTIVGALIQSVKKLSDVMILTVFCLSVFALIGLQLFMGNLRNKCLQWPPDNSSFEINITSFFNNSLDGNGTTFNRTVSIFNWDEYIEDKSHFYFLEGQNDALLCGNSSDAGQCPEGYICVKAGRNPNYGYTSFDTFSWAFLSLFRLMTQDFWENLYQLTLRAAGKTYMIFFVLVIFLGSFYLINLILAVVAMAYEEQNQATLEEAEQKEAEFQQMLEQLKKQQEEAQAAAAAASAESRDFSGAGGIGVFSESSSVASKLSSKSEKELKNRRKKKKQKEQSGEEEKNDRVRKSESEDSIRRKGFRFSLEGSRLTYEKRFSSPHQSLLSIRGSLFSPRRNSRASLFSFRGRAKDIGSENDFADDEHSTFEDNDSRRDSLFVPHRHGERRHSNVSQASRASRVLPILPMNGKMHSAVDCNGVVSLVGGPSTLTSAGQLLPEGTTTETEIRKRRSSSYHVSMDLLEDPTSRQRAMSIASILTNTMEELEESRQKCPPCWYKFANMCLIWDCCKPWLKVKHLVNLVVMDPFVDLAITICIVLNTLFMAMEHYPMTEQFSSVLSVGNLVFTGIFTAEMFLKIIAMDPYYYFQEGWNIFDGFIVSLSLMELGLANVEGLSVLRSFRLLRVFKLAKSWPTLNMLIKIIGNSVGALGNLTLVLAIIVFIFAVVGMQLFGKSYKECVCKISNDCELPRWHMHDFFHSFLIVFRVLCGEWIETMWDCMEVAGQTMCLTVFMMVMVIGNLVVLNLFLALLLSSFSSDNLAATDDDNEMNNLQIAVGRMQKGIDFVKRKIREFIQKAFVRKQKALDEIKPLEDLNNKKDSCISNHTTIEIGKDLNYLKDGNGTTSGIGSSVEKYVVDESDYMSFINNPSLTVTVPIAVGESDFENLNTEEFSSESDMEESKEKLNATSSSEGSTVDIGAPAEGEQPEVEPEESLEPEACFTEDCVRKFKCCQISIEEGKGKLWWNLRKTCYKIVEHNWFETFIVFMILLSSGALAFEDIYIEQRKTIKTMLEYADKVFTYIFILEMLLKWVAYGFQVYFTNAWCWLDFLIVDVSLVSLTANALGYSELGAIKSLRTLRALRPLRALSRFEGMRVVVNALLGAIPSIMNVLLVCLIFWLIFSIMGVNLFAGKFYHCINYTTGEMFDVSVVNNYSECKALIESNQTARWKNVKVNFDNVGLGYLSLLQVATFKGWMDIMYAAVDSRNVELQPKYEDNLYMYLYFVIFIIFGSFFTLNLFIGVIIDNFNQQKKKFGGQDIFMTEEQKKYYNAMKKLGSKKPQKPIPRPANKFQGMVFDFVTKQVFDISIMILICLNMVTMMVETDDQSQEMTNILYWINLVFIVLFTGECVLKLISLRYYYFTIGWNIFDFVVVILSIVGMFLAELIEKYFVSPTLFRVIRLARIGRILRLIKGAKGIRTLLFALMMSLPALFNIGLLLFLVMFIYAIFGMSNFAYVKREVGIDDMFNFETFGNSMICLFQITTSAGWDGLLAPILNSGPPDCDPDKDHPGSSVKGDCGNPSVGIFFFVSYIIISFLVVVNMYIAVILENFSVATEESAEPLSEDDFEMFYEVWEKFDPDATQFIEFAKLSDFADALDPPLLIAKPNKVQLIAMDLPMVSGDRIHCLDILFAFTKRVLGESGEMDALRIQMEERFMASNPSKVSYEPITTTLKRKQEEVSAIIIQRAYRRYLLKQKVKKVSSIYKKDKGKECDGTPIKEDTLIDKLNENSTPEKTDMTPSTTSPPSYDSVTKPEKEKFEKDKSEKEDKGKDIRESKK

SEQ ID NO: 35299 - protein, 2005 aa, Homo sapiens; identical to SEQ ID NO: 35298
  REGION 1..2005: note = ENSP00000283256

SEQ ID NO: 35300 - protein, 92 aa, Homo sapiens; identical to SEQ ID NO: 35294
  REGION 1..92: note = ENSP00000489873

SEQ ID NO: 35301 - protein, 730 aa, Homo sapiens
  REGION 1..730: note = ENSP00000490800
MAQSVLVPPGPDSFRFFTRESLAAIEQRIAEEKAKRPKQERKDEDDENGPKPNSDLEAGKSLPFIYGDIPPEMVSVPLEDLDPYYINKKTFIVLNKGKAISRFSATPALYILTPFNPIRKLAIKILVHSLFNMLIMCTILTNCVFMTMSNPPDWTKNVEYTFTGIYTFESLIKILARGFCLEDFTFLRDPWNWLDFTVITFAYVTEFVDLGNVSALRTFRVLRALKTISVIPGLKTIVGALIQSVKKLSDVMILTVFCLSVFALIGLQLFMGNLRNKCLQWPPDNSSFEINITSFFNNSLDGNGTTFNRTVSIFNWDEYIEDKSHFYFLEGQNDALLCGNSSDAGQCPEGYICVKAGRNPNYGYTSFDTFSWAFLSLFRLMTQDFWENLYQLTLRAAGKTYMIFFVLVIFLGSFYLINLILAVVAMAYEEQNQATLEEAEQKEAEFQQMLEQLKKQQEEAQAAAAAASAESRDFSGAGGIGVFSESSSVASKLSSKSEKELKNRRKKKKQKEQSGEEEKNDRVRKSESEDSIRRKGFRFSLEGSRLTYEKRFSSPHQSLLSIRGSLFSPRRNSRASLFSFRGRAKDIGSENDFADDEHSTFEDNDSRRDSLFVPHRHGERRHSNVSQASRASRVLPILPMNGKMHSAVDCNGVVSLVGGPSTLTSAGQLLPEGTTTETEIRKRRSSSYHVSMDLLEDPTSRQRAMSIASILTNTMEGKSFEDCLAFRSLP

SEQ ID NO: 35302 - protein, 178 aa, Homo sapiens
  REGION 1..178: note = ENSP00000487466
WTKNVEYTFTGIYTFESLIKILARGFCLEDFTFLRDPWNWLDFTVITFAYVTEFVDLGNVSALRTFRVLRALKTISVIPGLKTIVGALIQSVKKLSDVMILTVFCLSVFALIGLQLFMGNLRNKCLQWPPDNSSFEINITSFFNNSLDGNGTTFNRTVSIFNWDEYIEDKSKIYSINH

SEQ ID NO: 35303 - protein, 2005 aa, Homo sapiens; identical to SEQ ID NO: 35298
  REGION 1..2005: note = ENSP00000364586

SEQ ID NO: 35304 - protein, 2005 aa, Homo sapiens; identical to SEQ ID NO: 35293
  REGION 1..2005: note = ENSP00000364576

SEQ ID NO: 35305 - protein, 215 aa, Homo sapiens
  REGION 1..215: note = ENSP00000278947
MHRDAWLPRPAFSLTGLSLFFSLVPPGRSMEVTVPATLNVLNGSDARLPCTFNSCYTVNHKQFSLNWTYQECNNCSEEMFLQFRMKIINLKLERFQDRVEFSGNPSKYDVSVMLRNVQPEDEGIYNCYIMNPPDRHRGHGKIHLQVLMEEPPERDSTVAVIVGASVGGFLAVVILVLMVVKCVRRKKEQKLSTDDLKTEEEGKTDGEGNPDDGAK

SEQ ID NO: 35306 - protein, 228 aa, Homo sapiens
  REGION 1..228: note = ENSP00000322460
MPGAGDGGKAPARWLGTGLLGLFLLPVTLSLEVSVGKATDIYAVNGTEILLPCTFSSCFGFEDLHFRWTYNSSDAFKILIEGTVKNEKSDPKVTLKDDDRITLVGSTKEKMNNISIVLRDLEFSDTGKYTCHVKNPKENNLQHHATIFLQVVDRLEEVDNTVTLIILAVVGGVIGLLILILLIKKLIIFILKKTREKKKECLVSSSGNDNTENGLPGSKAEEKPPSKV

SEQ ID NO: 35307 - protein, 94 aa, Homo sapiens
  REGION 1..94: note = ENSP00000436343
MPGAGDGGKAPARWLGTGLLVEEVDNTVTLIILAVVGGVIGLLILILLIKKLIIFILKKTREKKKECLVSSSGNDNTENGLPGSKAEEKPPSKV

SEQ ID NO: 35308 - protein, 1977 aa, Homo sapiens
  REGION 1..1977: note = ENSP00000386306
MAMLPPPGPQSFVHFTKQSLALIEQRIAERKSKEPKEEKKDDDEEAPKPSSDLEAGKQLPFIYGDIPPGMVSEPLEDLDPYYADKKTFIVLNKGKTIFRFNATPALYMLSPFSPLRRISIKILVHSLFSMLIMCTILTNCIFMTMNNPPDWTKNVEYTFTGIYTFESLVKILARGFCVGEFTFLRDPWNWLDFVVIVFAYLTEFVNLGNVSALRTFRVLRALKTISVIPGLKTIVGALIQSVKKLSDVMILTVFCLSVFALIGLQLFMGNLKHKCFRNSLENNETLESIMNTLESEEDFRKYFYYLEGSKDALLCGFSTDSGQCPEGYTCVKIGRNPDYGYTSFDTFSWAFLALFRLMTQDYWENLYQQTLRAAGKTYMIFFVVVIFLGSFYLINLILAVVAMAYEEQNQANIEEAKQKELEFQQMLDRLKKEQEEAEAIAAAAAEYTSIRRSRIMGLSESSSETSKLSSKSAKERRNRRKKKNQKKLSSGEEKGDAEKLSKSESEDSIRRKSFHLGVEGHRRAHEKRLSTPNQSPLSIRGSLFSARRSSRTSLFSFKGRGRDIGSETEFADDEHSIFGDNESRRGSLFVPHRPQERRSSNISQASRSPPMLPVNGKMHSAVDCNGVVSLVDGRSALMLPNGQLLPEGTTNQIHKKRRCSSYLLSEDMLNDPNLRQRAMSRASILTNTVEELEESRQKCPPWWYRFAHKFLIWNCSPYWIKFKKCIYFIVMDPFVDLAITICIVLNTLFMAMEHHPMTEEFKNVLAIGNLVFTGIFAAEMVLKLIAMDPYEYFQVGWNIFDSLIVTLSLVELFLADVEGLSVLRSFRLLRVFKLAKSWPTLNMLIKIIGNSVGALGNLTLVLAIIVFIFAVVGMQLFGKSYKECVCKINDDCTLPRWHMNDFFHSFLIVFRVLCGEWIETMWDCMEVAGQAMCLIVYMMVMVIGNLVVLNLFLALLLSSFSSDNLTAIEEDPDANNLQIAVTRIKKGINYVKQTLREFILKAFSKKPKISREIRQAEDLNTKKENYISNHTLAEMSKGHNFLKEKDKISGFGSSVDKHLMEDSDGQSFIHNPSLTVTVPIAPGESDLENMNAEELSSDSDSEYSKVRLNRSSSSECSTVDNPLPGEGEEAEAEPMNSDEPEACFTDGCVWRFSCCQVNIESGKGKIWWNIRKTCYKIVEHSWFESFIVLMILLSSGALAFEDIYIERKKTIKIILEYADKIFTYIFILEMLLKWIAYGYKTYFTNAWCWLDFLIVDVSLVTLVANTLGYSDLGPIKSLRTLRALRPLRALSRFEGMRVVVNALIGAIPSIMNVLLVCLIFWLIFSIMGVNLFAGKFYECINTTDGSRFPASQVPNRSECFALMNVSQNVRWKNLKVNFDNVGLGYLSLLQVATFKGWTIIMYAAVDSVNVDKQPKYEYSLYMYIYFVVFIIFGSFFTLNLFIGVIIDNFNQQKKKLGGQDIFMTEEQKKYYNAMKKLGSKKPQKPIPRPGNKIQGCIFDLVTNQAFDISIMVLICLNMVTMMVEKEGQSQHMTEVLYWINVVFIILFTGECVLKLISLRHYYFTVGWNIFDFVVVIISIVGMFLADLIETYFVSPTLFRVIRLARIGRILRLVKGAKGIRTLLFALMMSLPALFNIGLLLFLVMFIYAIFGMSNFAYVKKEDGINDMFNFETFGNSMICLFQITTSAGWDGLLAPILNSKPPDCDPKKVHPGSSVEGDCGNPSVGIFYFVSYIIISFLVVVNMYIAVILENFSVATEESTEPLSEDDFEMFYEVWEKFDPDATQFIEFSKLSDFAAALDPPLLIAKPNKVQLIAMDLPMVSGDRIHCLDILFAFTKRVLGESGEMDSLRSQMEERFMSANPSKVSYEPITTTLKRKQEDVSATVIQRAYRRYRLRQNVKNISSIYIKDGDRDDDLLNKKDMAFDNVNENSSPEKTDATSSTTSPPSYDSVTKPDKEKYEQDRTEKEDKGKDSKESKK

SEQ ID NO: 35309 - protein, 1988 aa, Homo sapiens
  REGION 1..1988: note = ENSP00000386330
MAMLPPPGPQSFVHFTKQSLALIEQRIAERKSKEPKEEKKDDDEEAPKPSSDLEAGKQLPFIYGDIPPGMVSEPLEDLDPYYADKKTFIVLNKGKTIFRFNATPALYMLSPFSPLRRISIKILVHSLFSMLIMCTILTNCIFMTMNNPPDWTKNVEYTFTGIYTFESLVKILARGFCVGEFTFLRDPWNWLDFVVIVFAYLTEFVNLGNVSALRTFRVLRALKTISVIPGLKTIVGALIQSVKKLSDVMILTVFCLSVFALIGLQLFMGNLKHKCFRNSLENNETLESIMNTLESEEDFRKYFYYLEGSKDALLCGFSTDSGQCPEGYTCVKIGRNPDYGYTSFDTFSWAFLALFRLMTQDYWENLYQQTLRAAGKTYMIFFVVVIFLGSFYLINLILAVVAMAYEEQNQANIEEAKQKELEFQQMLDRLKKEQEEAEAIAAAAAEYTSIRRSRIMGLSESSSETSKLSSKSAKERRNRRKKKNQKKLSSGEEKGDAEKLSKSESEDSIRRKSFHLGVEGHRRAHEKRLSTPNQSPLSIRGSLFSARRSSRTSLFSFKGRGRDIGSETEFADDEHSIFGDNESRRGSLFVPHRPQERRSSNISQASRSPPMLPVNGKMHSAVDCNGVVSLVDGRSALMLPNGQLLPEVIIDKATSDDSGTTNQIHKKRRCSSYLLSEDMLNDPNLRQRAMSRASILTNTVEELEESRQKCPPWWYRFAHKFLIWNCSPYWIKFKKCIYFIVMDPFVDLAITICIVLNTLFMAMEHHPMTEEFKNVLAIGNLVFTGIFAAEMVLKLIAMDPYEYFQVGWNIFDSLIVTLSLVELFLADVEGLSVLRSFRLLRVFKLAKSWPTLNMLIKIIGNSVGALGNLTLVLAIIVFIFAVVGMQLFGKSYKECVCKINDDCTLPRWHMNDFFHSFLIVFRVLCGEWIETMWDCMEVAGQAMCLIVYMMVMVIGNLVVLNLFLALLLSSFSSDNLTAIEEDPDANNLQIAVTRIKKGINYVKQTLREFILKAFSKKPKISREIRQAEDLNTKKENYISNHTLAEMSKGHNFLKEKDKISGFGSSVDKHLMEDSDGQSFIHNPSLTVTVPIAPGESDLENMNAEELSSDSDSEYSKVRLNRSSSSECSTVDNPLPGEGEEAEAEPMNSDEPEACFTDGCVWRFSCCQVNIESGKGKIWWNIRKTCYKIVEHSWFESFIVLMILLSSGALAFEDIYIERKKTIKIILEYADKIFTYIFILEMLLKWIAYGYKTYFTNAWCWLDFLIVDVSLVTLVANTLGYSDLGPIKSLRTLRALRPLRALSRFEGMRVVVNALIGAIPSIMNVLLVCLIFWLIFSIMGVNLFAGKFYECINTTDGSRFPASQVPNRSECFALMNVSQNVRWKNLKVNFDNVGLGYLSLLQVATFKGWTIIMYAAVDSVNVDKQPKYEYSLYMYIYFVVFIIFGSFFTLNLFIGVIIDNFNQQKKKLGGQDIFMTEEQKKYYNAMKKLGSKKPQKPIPRPGNKIQGCIFDLVTNQAFDISIMVLICLNMVTMMVEKEGQSQHMTEVLYWINVVFIILFTGECVLKLISLRHYYFTVGWNIFDFVVVIISIVGMFLADLIETYFVSPTLFRVIRLARIGRILRLVKGAKGIRTLLFALMMSLPALFNIGLLLFLVMFIYAIFGMSNFAYVKKEDGINDMFNFETFGNSMICLFQITTSAGWDGLLAPILNSKPPDCDPKKVHPGSSVEGDCGNPSVGIFYFVSYIIISFLVVVNMYIAVILENFSVATEESTEPLSEDDFEMFYEVWEKFDPDATQFIEFSKLSDFAAALDPPLLIAKPNKVQLIAMDLPMVSGDRIHCLDILFAFTKRVLGESGEMDSLRSQMEERFMSANPSKVSYEPITTTLKRKQEDVSATVIQRAYRRYRLRQNVKNISSIYIKDGDRDDDLLNKKDMAFDNVNENSSPEKTDATSSTTSPPSYDSVTKPDKEKYEQDRTEKEDKGKDSKESKK

SEQ ID NO: 35310 - protein, 528 aa, Homo sapiens
  REGION 1..528: note = ENSP00000413212
ILTNCIFMTMNNPPDWTKNVEYTFTGIYTFESLVKILARGFCVGEFTFLRDPWNWLDFVVIVFAYVTEFVDLGNVSALRTFRVLRALKTISVIPGLKTIVGALIQSVKKLSDVMILTVFCLSVFALIGLQLFMGNLKHKCFRNSLENNETLESIMNTLESEEDFRKYFYYLEGSKDALLCGFSTDSGQCPEGYTCVKIGRNPDYGYTSFDTFSWAFLALFRLMTQDYWENLYQQTLRAAGKTYMIFFVVVIFLGSFYLINLILAVVAMAYEEQNQANIEEAKQKELEFQQMLDRLKKEQEEAEAIAAAAAEYTSIRRSRIMGLSESSSETSKLSSKSAKERRNRRKKKNQKKLSSGEEKGDAEKLSKSESEDSIRRKSFHLGVEGHRRAHEKRLSTPNQSPLSIRGSLFSARRSSRTSLFSFKGRGRDIGSETEFADDEHSIFGDNESRRGSLFVPHRPQERRSSNISQASRSPPMLPVNGKMHSAVDCNGVVSLVDGRSALMLPNGQLLPEGTTNQIHKKRRCSSYL

SEQ ID NO: 35311 - protein, 539 aa, Homo sapiens
  REGION 1..539: note = ENSP00000393141
ILTNCIFMTMNNPPDWTKNVEYTFTGIYTFESLVKILARGFCVGEFTFLRDPWNWLDFVVIVFAYVTEFVDLGNVSALRTFRVLRALKTISVIPGLKTIVGALIQSVKKLSDVMILTVFCLSVFALIGLQLFMGNLKHKCFRNSLENNETLESIMNTLESEEDFRKYFYYLEGSKDALLCGFSTDSGQCPEGYTCVKIGRNPDYGYTSFDTFSWAFLALFRLMTQDYWENLYQQTLRAAGKTYMIFFVVVIFLGSFYLINLILAVVAMAYEEQNQANIEEAKQKELEFQQMLDRLKKEQEEAEAIAAAAAEYTSIRRSRIMGLSESSSETSKLSSKSAKERRNRRKKKNQKKLSSGEEKGDAEKLSKSESEDSIRRKSFHLGVEGHRRAHEKRLSTPNQSPLSIRGSLFSARRSSRTSLFSFKGRGRDIGSETEFADDEHSIFGDNESRRGSLFVPHRPQERRSSNISQASRSPPMLPVNGKMHSAVDCNGVVSLVDGRSALMLPNGQLLPEVIIDKATSDDSGTTNQIHKKRRCSSYL

SEQ ID NO: 35312 - protein, 1988 aa, Homo sapiens; identical to SEQ ID NO: 35309
  REGION 1..1988: note = ENSP00000304748

SEQ ID NO: 35313 - protein, 649 aa, Homo sapiens
  REGION 1..649: note = ENSP00000300061
MAPGEKIKAKIKKNLPVTGPQAPTIKELMRWYCLNTNTHGCRRIVVSRGRLRRLLWIGFTLTAVALILWQCALLVFSFYTVSVSIKVHFRKLDFPAVTICNINPYKYSTVRHLLADLEQETREALKSLYGFPESRKRREAESWNSVSEGKQPRFSHRIPLLIFDQDEKGKARDFFTGRKRKVGGSIIHKASNVMHIESKQVVGFQLCSNDTSDCATYTFSSGINAIQEWYKLHYMNIMAQVPLEKKINMSYSAEELLVTCFFDGVSCDARNFTLFHHPMHGNCYTFNNRENETILSTSMGGSEYGLQVILYINEEEYNPFLVSSTGAKVIIHRQDEYPFVEDVGTEIETAMVTSIGMHLTESFKLSEPYSQCTEDGSDVPIRNIYNAAYSLQICLHSCFQTKMVEKCGCAQYSQPLPPAANYCNYQQHPNWMYCYYQLHRAFVQEELGCQSVCKEACSFKEWTLTTSLAQWPSVVSEKWLLPVLTWDQGRQVNKKLNKTDLAKLLIFYKDLNQRSIMESPANSIEMLLSNFGGQLGLWMSCSVVCVIEIIEVFFIDFFSIIARRQWQKAKEWWAWKQAPPCPEAPRSPQGQDNPALDIDDDLPTFNSALHLPPALGTQVPGTPPPKYNTLRLERAFSNQLTDTQMLDEL

SEQ ID NO: 35314 - protein, 348 aa, Homo sapiens
  REGION 1..348: note = ENSP00000455711
MPRSFLVKKVKLDAFSSADLESAYGRARSDLGAPLHDKGYLSDYVGPSSVYDGDAEAALLKGPSPEPMYAAAVRGELGPAAAGSAPPPTPRPELATAAGGYINGDAAVSEGYAADAFFITDGRSRRKASNAGAAAAPSTASAAAPDGDAGGGGGAGGRSLGSGPGGRGGTRAGAGTEARAGPGAAGAGGRHACGECGKTYATSSNLSRHKQTHRSLDSQLARRCPTCGKVYVSMPAMAMHLLTHDLRHKCGVCGKAFSRPWLLQGHMRSHTGEKPFGCAHCGKAFADRSNLRAHMQTHSAFKHFQCKRCKKSFALKSYLNKHYESACFKGGAGGPAAPAPPQLSPVQA

SEQ ID NO: 35315 - protein, 988 aa, Homo sapiens
  REGION 1..988: note = ENSP00000354080
MGAAAVRWHLCVLLALGTRGRLAGGSGLPGSVDVDECSEGTDDCHIDAICQNTPKSYKCLCKPGYKGEGKQCEDIDECENDYYNGGCVHECINIPGNYRCTCFDGFMLAHDGHNCLDVDECQDNNGGCQQICVNAMGSYECQCHSGFFLSDNQHTCIHRSNEGMNCMNKDHGCAHICRETPKGGVACDCRPGFDLAQNQKDCTLTCNYGNGGCQHSCEDTDTGPTCGCHQKYALHSDGRTCIETCAVNNGGCDRTCKDTATGVRCSCPVGFTLQPDGKTCKDINECLVNNGGCDHFCRNTVGSFECGCRKGYKLLTDERTCQDIDECSFERTCDHICINSPGSFQCLCHRGYILYGTTHCGDVDECSMSNGSCDQGCVNTKGSYECVCPPGRRLHWNGKDCVETGKCLSRAKTSPRAQLSCSKAGGVESCFLSCPAHTLFVPDSENSYVLSCGVPGPQGKALQKRNGTSSGLGPSCSDAPTTPIKQKARFKIRDAKCHLRPHSQARAKETARQPLLDHCHVTFVTLKCDSSKKRRRGRKSPSKEVSHITAEFEIETKMEEASDTCEADCLRKRAEQSLQAAIKTLRKSIGRQQFYVQVSGTEYEVAQRPAKALEGQGACGAGQVLQDSKCVACGPGTHFGGELGQCVSCMPGTYQDMEGQLSCTPCPSSDGLGLPGARNVSECGGQCSPGFFSADGFKPCQACPVGTYQPEPGRTGCFPCGGGLLTKHEGTTSFQDCEAKVHCSPGHHYNTTTHRCIRCPVGTYQPEFGQNHCITCPGNTSTDFDGSTNVTHCKNQHCGGELGDYTGYIESPNYPGDYPANAECVWHIAPPPKRRILIVVPEIFLPIEDECGDVLVMRKSASPTSITTYETCQTYERPIAFTSRSRKLWIQFKSNEGNSGKGFQVPYVTYDEDYQQLIEDIVRDGRLYASENHQEILKDKKLIKALFDVLAHPQNYFKYTAQESKEMFPRSFIKLLRSKVSRFLRPYK

SEQ ID NO: 35316 - protein, 175 aa, Homo sapiens
  REGION 1..175: note = ENSP00000395327
  VARIANT 1: note = Any amino acid
XRETPKGGVACDCRPGFDLAQNQKDCTLTCNYGNGGCQHSCEDTDTGPTCGCHQKYALHSDGRTCIEKDEAAIERSQFNATSVADVDKRVKRRLLMETCAVNNGGCDRTCKDTATGVRCSCPVGFTLQPDGKTCKDINECLVNNGGCDHFCRNTVGSFECGCRKGYKLLTDERTC

SEQ ID NO: 35317 - protein, 347 aa, Homo sapiens
  REGION 1..347: note = ENSP00000290460
MGAAAVRWHLCVLLALGTRGRLAGGSGLPGSVDVDECSEGTDDCHIDAICQNTPKSYKCLCKPGYKGEGKQCEDIDECENDYYNGGCVHECINIPGNYRCTCFDGFMLAHDGHNCLDVDECQDNNGGCQQICVNAMGSYECQCHSGFFLSDNQHTCIHRSNEGMNCMNKDHGCAHICRETPKGGVACDCRPGFDLAQNQKDCTLTCNYGNGGCQHSCEDTDTGPTCGCHQKYALHSDGRTCIEKDEAAIERSQFNATSVADVDKRVKRRLLMETCAVNNGGCDRTCKDTATGVRCSCPVGFTLQPDGKTCKGQHVELCGCPCLYWPGQEPPCACIAGPRAGLNGGHV

SEQ ID NO: 35318 - protein, 363 aa, Homo sapiens [sequence omitted]

SEQ ID NO: 35319 - protein, 310 aa, Homo sapiens
  REGION 1..310: note = ENSP00000254351
MRRAALWLWLCALALSLQPALPQIVATNLPPEDQDGSGDDSDNFSGSGAGALQDITLSQQTPSTWKDTQLLTAIPTSPEPTGLEATAASTSTLPAGEGPKEGEAVVLPEVEPGLTAREQEATPRPRETTQLPTTHLASTTTATTAQEPATSHPHRDMQPGHHETSTPAGPSQADLHTPHTEDGGPSATERAAEDGASSQLPAAEGSGEQDFTFETSGENTAVVAVEPDRRNQSPVDQGATGASQGLLDRKEVLGGVIAGGLVGLIFAVCLVGFMLYRMKKKDEGSYSLEEPKQANGGAYQKPTKQEEFYA

SEQ ID NO: 35320 - protein, 169 aa, Homo sapiens
  REGION 1..169: note = ENSP00000384613
MRRAALWLWLCALALSLQPALPQIVATNLPPEDQDGSGDDSDNFSGSGAGALQDITLSQQTPSTWKDTQLLTAIPTSPEPTGLEATAASTSTLPAGEGPKEGEAVVLPEVEPGLTAREQEATPRPRETTQLPTTHLASTTTATTAQEPATSHPHRDMQPVHFVSWGGLI

SEQ ID NO: 35321 - protein, 215 aa, Homo sapiens
  REGION 1..215: note = ENSP00000400773
PRWPGEPGQGCVGGAGERLQGPRACRGRLEQIVATNLPPEDQDGSGDDSDNFSGSGAGALQDITLSQQTPSTWKDTQLLTAIPTSPEPTGLEATAASTSTLPAGEGPKEGEAVVLPEVEPGLTAREQEATPRPRETTQLPTTHLASTTTATTAQEPATSHPHRDMQPGHHETSTPAGPSQADLHTPHTEDGGPSATERAAEDGASSQLPAAEGSG

SEQ ID NO: 35322 - protein, 28 aa, Homo sapiens
  REGION 1..28: note = ENSP00000390201
MRRAALWLWLCALALSLQPALPSLSHGR

SEQ ID NO: 35323 - protein, 310 aa, Homo sapiens; identical to SEQ ID NO: 35319
  REGION 1..310: note = ENSP00000370542

SEQ ID NO: 35324 - protein, 384 aa, Homo sapiens
  REGION 1..384: note = ENSP00000338346
MAIAYLGSSCPSQPPSSLALSLSPTPSDFEQESGIETAMRFSPDVALAVSTTPAVLPTTNIQPVGTPFEELPSERPTLEPATSPLVVTEVPEEPSQRATTVSTTMATTAATSTGDPTVATVPATVATATPSTPAAPPFTATTAVIRTTGVRRLLPLPLTTVATARATTPEAPSPPTTAAVLDTEAPTPRLVSTATSRPRALPRPATTQEPDIPERSTLPLGTTAPGPTEVAQTPTPETFLTTIRDEPEVPVSGGPSGDFELPEEETTQPDTANEVVAVGGAAAKASSPPGTLPKGARPGPGLLDNAIDSGSSAAQLPQKSILERKEVLVAVIVGGVVGALFAAFLVTLLIYRMKKKDEGSYTLEEPKQASVTYQKPDKQEEFYA

SEQ ID NO: 35325 - protein, 442 aa, Homo sapiens
  REGION 1..442: note = ENSP00000344468
MKPGPPHRAGAAHGAGAGAGAAAGPGARGLLLPPLLLLLLAGRAAGAQRWRSENFERPVDLEGSGDDDSFPDDELDDLYSGSGSGYFEQESGIETAMRFSPDVALAVSTTPAVLPTTNIQPVGTPFEELPSERPTLEPATSPLVVTEVPEEPSQRATTVSTTMATTAATSTGDPTVATVPATVATATPSTPAAPPFTATTAVIRTTGVRRLLPLPLTTVATARATTPEAPSPPTTAAVLDTEAPTPRLVSTATSRPRALPRPATTQEPDIPERSTLPLGTTAPGPTEVAQTPTPETFLTTIRDEPEVPVSGGPSGDFELPEEETTQPDTANEVVAVGGAAAKASSPPGTLPKGARPGPGLLDNAIDSGSSAAQLPQKSILERKEVLVAVIVGGVVGALFAAFLVTLLIYRMKKKDEGSYTLEEPKQASVTYQKPDKQEEFYA

SEQ ID NO: 35326 - protein, 198 aa, Homo sapiens
  REGION 1..198: note = ENSP00000361818
MAPARLFALLLFFVGGVAESIRETEVIDPQDLLEGRYFSGALPDDEDVVGPGQESDDFELSGSGDLDDLEDSMIGPEVVHPLVPLDNHIPERAGSGSQVPTEPKKLEENEVIPKRISPVEESEDVSNKVSMSSTVQGSNIFERTEVLAALIVGGIVGILFAVFLILLLMYRMKKKDEGSYDLGKKPIYKKAPTNEFYA

SEQ ID NO: 35327 - protein, 2213 aa, Homo sapiens
  REGION 1..2213: note = ENSP00000385899
MARGARPSAAGGGGGGAEPPERAGPGRPRGSPPGRARPSLAPRPGPEPSRPRAAPETSGGDTAGAGRCGGRRAAKLGPGRRGWWALLALQLHLLRALAQDDVAPYFKTEPGLPQIHLEGNRLVLTCLAEGSWPLEFKWMRDDSELTTYSSEYKYIIPSLQKLDAGFYRCVVRNRMGALLQRKSEVQVAYMGSFMDTDQRKTVSQGRAAILNLLPITSYPRPQVTWFREGHKIIPSNRIAITLENQLVILATTTSDAGAYYVQAVNEKNGENKTSPFIHLSIARDVGTPETMAPTIVVPPGNRSVVAGSSETTLECIASARPVEDLSVTWKRNGVRITSGLHSFGRRLTISNPTSADTGPYVCEAALPGSAFEPARATAFLFIIEPPYFTAEPESRISAEVEETVDIGCQAMGVPLPTLQWYKDAISISRLQNPRYKVLASGGLRIQKLRPEDSGIFQCFASNEGGEIQTHTYLDVTNIAPVFTQRPVDTTVTDGMTAILRCEVSGAPKPAITWKRENHILASGSVRIPRFMLLESGGLQIAPVFIQDAGNYTCYAANTEGSLNASATLTVWNRTSIVHPPEDHVVIKGTTATLHCGATHDPRVSLRYVWKKDNVALTPSSTSRIVVEKDGSLLISQTWSGDIGDYSCEIVSEGGNDSRMARLEVIELPHSPQNLLVSPNSSHSHAVVLSWVRPFDGNSPILYYIVELSENNSPWKVHLSNVGPEMTGVTVSGLTPARTYQFRVCAVNEVGRGQYSAETSRLMLPEEPPSAPPKNIVASGRTNQSIMVQWQPPPETEHNGVLRGYILRYRLAGLPGEYQQRNITSPEVNYCLVTDLIIWTQYEIQVAAYNGAGLGVFSRAVTEYTLQGVPTAPPQNVQTEAVNSTTIQFLWNPPPQQFINGINQGYKLLAWPADAPEAVTVVTIAPDFHGVHHGHITNLKKFTAYFTSVLCFTTPGDGPPSTPQLVWTQEDKPGAVGHLSFTEILDTSLKVSWQEPLEKNGIITGYQISWEVYGRNDSRLTHTLNSTTHEYKIQGLSSLTTYTIDVAAVTAVGTGLVTSSTISSGVPPDLPGAPSNLVISNISPRSATLQFRPGYDGKTSISRWIVEGQVGAIGDEEEWVTLYEEENEPDAQMLEIPNLTPYTHYRFRMKQVNIVGPSPYSPSSRVIQTLQAPPDVAPTSVTVRTASETSLRLRWVPLPDSQYNGNPESVGYRIKYWRSDLQSSAVAQVVSDRLEREFTIEELEEWMEYELQMQAFNAVGAGPWSEVVRGRTRESVPSAAPENVSAEAVSSTQILLTWTSVPEQDQNGLILGYKILFRAKDLDPEPRSHIVRGNHTQSALLAGLRKFVLYELQVLAFTRIGNGVPSTPLILERTKDDAPGPPVRLVFPEVRLTSVRIVWQPPEEPNGIILGYQIAYRLASSSPHTFTTVEVGATVRQFTATDLAPESAYIFRLSAKTRQGWGEPLEATVITTEKRERPAPPRELLVPQAEVTARSLRLQWVPGSDGASPIRYFTMQVRELPRGEWQTYSSSISHEATACVVDRLRPFTSYKLRLKATNDIGDSDFSSETEAVTTLQDVPGEPPGSVSATPHTTSSVLIQWQPPRDESLNGLLQGYRIYYRELEYEAGSGTEAKTLKNPIALHAELTAQSSFKTVNSSSTSTMCELTHLKKYRRYEVIMTAYNIIGESPASAPVEVFVGEAAPAMAPQNVQVTPLTASQLEVTWDPPPPESQNGNIQGYKIYYWEADSQNETEKMKVLFLPEPVVRLKNLTSHTKYLVSISAFNAAGDGPKSDPQQGRTHQAAPGAPSFLAFSEITSTTLNVSWGEPAAANGILQGYRVVYEPLAPVQGVSKVVTVEVRGNWQRWLKVRDLTKGVTYFFRVQARTITYGPELQANITAGPAEGSPGSPRDVLVTKSASELTLQWTEGHSGDTPTTGYVIEARPSDEGLWDMFVKDIPRSATSYTLSLDKLRQGVTYEFRVVAVNEAGYGEPSNPSTAVSAQVEAPFYEEWWFLLVMALSSLIVILLVVFALVLHGQNKKYKNCSTGKGISTMEESVTLDNGGFAALELSSRHLNVKSTFSKKNGTRSPPRPSPGGLHYSDEDICNKYNGAVLTESVSLKEKSADASESEATDSDYEDALPKHSFVNHYMSDPTYYNSWKRRAQGRAPAPHRYEAVAGSEAGAQLHPVITTQSAGGVYTPAGPGARTPLTGFSSFV

SEQ ID NO: 35328 - protein, 2193 aa, Homo sapiens
  REGION 1..2193: note = ENSP00000374182
MARGARPSAAGGGGGGAEPPERAGPGRPRGSPPGRARPSLAPRPGPEPSRPRAAPETSGGDTAGAGRCGGRRAAKLGPGRRGWWALLALQLHLLRALAQDDVAPYFKTEPGLPQIHLEGNRLVLTCLAEGSWPLEFKWMRDDSELTTYSSEYKYIIPSLQKLDAGFYRCVVRNRMGALLQRKSEVQVAYMGSFMDTDQRKTVSQGRAAILNLLPITSYPRPQVTWFREGHKIIPSNRIAITLENQLVILATTTSDAGAYYVQAVNEKNGENKTSPFIHLSIARDVGTPETMAPTIVVPPGNRSVVAGSSETTLECIASARPVEDLSVTWKRNGVRITSGLHSFGRRLTISNPTSADTGPYVCEAALPGSAFEPARATAFLFIIEPPYFTAEPESRISAEVEETVDIGCQAMGVPLPTLQWYKDAISISRLQNPRYKVLASGGLRIQKLRPEDSGIFQCFASNEGGEIQTHTYLDVTNIAPVFTQRPVDTTVTDGMTAILRCEVSGAPKPAITWKRENHILASGSVRIPRFMLLESGGLQIAPVFIQDAGNYTCYAANTEGSLNASATLTVWNRTSIVHPPEDHVVIKGTTATLHCGATHDPRVSLRYVWKKDNVALTPSSTSRIVVEKDGSLLISQTWSGDIGDYSCEIVSEGGNDSRMARLEVIELPHSPQNLLVSPNSSHSHAVVLSWVRPFDGNSPILYYIVELSENNSPWKVHLSNVGPEMTGVTVSGLTPARTYQFRVCAVNEVGRGQYSAETSRLMLPEEPPSAPPKNIVASGRTNQSIMVQWQPPPETEHNGVLRGYILRYRLAGLPGEYQQRNITSPEVNYCLVTDLIIWTQYEIQVAAYNGAGLGVFSRAVTEYTLQGVPTAPPQNVQTEAVNSTTIQFLWNPPPQQFINGINQGYKLLAWPADAPEAVTVVTIAPDFHGVHHGHITNLKKFTAYFTSVLCFTTPGDGPPSTPQLVWTQEDKPGAVGHLSFTEILDTSLKVSWQEPLEKNGIITGYQISWEVYGRNDSRLTHTLNSTTHEYKIQGLSSLTTYTIDVAAVTAVGTGLVTSSTISSGVPPDLPGAPSNLVISNISPRSATLQFRPGYDGKTSISRWIVEGQVGAIGDEEEWVTLYEEENEPDAQMLEIPNLTPYTHYRFRMKQVNIVGPSPYSPSSRVIQTLQAPPDVAPTSVTVRTASETSLRLRWVPLPDSQYNGNPESVGYRIKYWRSDLQSSAVAQVVSDRLEREFTIEELEEWMEYELQMQAFNAVGAGPWSEVVRGRTRESVPSAAPENVSAEAVSSTQILLTWTSVPEQDQNGLILGYKILFRAKDLDPEPRSHIVRGNHTQSALLAGLRKFVLYELQVLAFTRIGNGVPSTPLILERTKDDAPGPPVRLVFPEVRLTSVRIVWQPPEEPNGIILGYQIAYRLASSSPHTFTTVEVGATVRQFTATDLAPESAYIFRLSAKTRQGWGEPLEATVITTEKRERPAPPRELLVPQAEVTARSLRLQWVPGSDGASPIRYFTMQVRELPRGEWQTYSSSISHEATACVVDRLRPFTSYKLRLKATNDIGDSDFSSETEAVTTLQDVPGEPPGSVSATPHTTSSVLIQWQPPRDESLNGLLQGYRIYYRELEYEAGSGTEAKTLKNPIALHAELTDLKKYRRYEVIMTAYNIIGESPASAPVEVFVGEAAPAMAPQNVQVTPLTASQLEVTWDPPPPESQNGNIQGYKIYYWEADSQNETEKMKVLFLPEPVVRLKNLTSHTKYLVSISAFNAAGDGPKSDPQQGRTHQAAPGAPSFLAFSEITSTTLNVSWGEPAAANGILQGYRVVYEPLAPVQGVSKVVTVEVRGNWQRWLKVRDLTKGVTYFFRVQARTITYGPELQANITAGPAEGSPGSPRDVLVTKSASELTLQWTEGHSGDTPTTGYVIEARPSDEGLWDMFVKDIPRSATSYTLSLDKLRQGVTYEFRVVAVNEAGYGEPSNPSTAVSAQVEAPFYEEWWFLLVMALSSLIVILLVVFALVLHGQNKKYKNCSTGKGISTMEESVTLDNGGFAALELSSRHLNVKSTFSKKNGTRSPPRPSPGGLHYSDEDICNKYNGAVLTESVSLKEKSADASESEATDSDYEDALPKHSFVNHYMSDPTYYNSWKRRAQGRAPAPHRYEAVAGSEAGAQLHPVITTQSAGGVYTPAGPGARTPLTGFSSFV

SEQ ID NO: 35329 - protein, 107 aa, Homo sapiens
  REGION 1..107: note = ENSP00000404118
  VARIANT 1: note = Any amino acid
XGDVGTPETMAPTIVVPPGNRSVVAGSSETTLECIASARPVEDLSVTWKRNGVRITSGLHSFGRRLTISNPTSADTGPYVCEAALPGSAFEPARATAFLFIIGPTLF

SEQ ID NO: 35330 - protein, 2213 aa, Homo sapiens
  REGION 1..2213: note = ENSP00000478062
MARGARPSAAGGGGGGAEPPERAGPGRPRGSPPGRARPSLAPRPGPEPSRPRAAPETSGGDTAGAGRCGGRRAAKLGPGRRGWWALLALQLHLLRALAQGRCAPYFKTEPGLPQIHLEGNRLVLTCLAEGSWPLEFKWMRDDSELTTYSSEYKYIIPSLQKLDAGFYRCVVRNRMGALLQRKSEVQVAYMGSFMDTDQRKTVSQGRAAILNLLPITSYPRPQVTWFREGHKIIPSNRIAITLENQLVILATTTSDAGAYYVQAVNEKNGENKTSPFIHLSIARDVGTPETMAPTIVVPPGNRSVVAGSSETTLECIASARPVEDLSVTWKRNGVRITSGLHSFGRRLTISNPTSADTGPYVCEAALPGSAFEPARATAFLFIIEPPYFTAEPESRISAEVEETVDIGCQAMGVPLPTLQWYKDAISISRLQNPRYKVLASGGLRIQKLRPEDSGIFQCFASNEGGEIQTHTYLDVTNIAPVFTQRPVDTTVTDGMTAILRCEVSGAPKPAITWKRENHILASGSVRIPRFMLLESGGLQIAPVFIQDAGNYTCYAANTEGSLNASATLTVWNRTSIVHPPEDHVVIKGTTATLHCGATHDPRVSLRYVWKKDNVALTPSSTSRIVVEKDGSLLISQTWSGDIGDYSCEIVSEGGNDSRMARLEVIELPHSPQNLLVSPNSSHSHAVVLSWVRPFDGNSPILYYIVELSENNSPWKVHLSNVGPEMTGVTVSGLTPARTYQFRVCAVNEVGRGQYSAETSRLMLPEEPPSAPPKNIVASGRTNQSIMVQWQPPPETEHNGVLRGYILRYRLAGLPGEYQQRNITSPEVNYCLVTDLIIWTQYEIQVAAYNGAGLGVFSRAVTEYTLQGVPTAPPQNVQTEAVNSTTIQFLWNPPPQQFINGINQGYKLLAWPADAPEAVTVVTIAPDFHGVHHGHITNLKKFTAYFTSVLCFTTPGDGPPSTPQLVWTQEDKPGAVGHLSFTEILDTSLKVSWQEPLEKNGIITGYQISWEVYGRNDSRLTHTLNSTTHEYKIQGLSSLTTYTIDVAAVTAVGTGLVTSSTISSGVPPDLPGAPSNLVISNISPRSATLQFRPGYDGKTSISRWIVEGQVGAIGDEEEWVTLYEEENEPDAQMLEIPNLTPYTHYRFRMKQVNIVGPSPYSPSSRVIQTLQAPPDVAPTSVTVRTASETSLRLRWVPLPDSQYNGNPESVGYRIKYWRSDLQSSAVAQVVSDRLEREFTIEELEEWMEYELQMQAFNAVGAGPWSEVVRGRTRESVPSAAPENVSAEAVSSTQILLTWTSVPEQDQNGLILGYKILFRAKDLDPEPRSHIVRGNHTQSALLAGLRKFVLYELQVLAFTRIGNGVPSTPLILERTKDDAPGPPVRLVFPEVRLTSVRIVWQPPEEPNGIILGYQIAYRLASSSPHTFTTVEVGATVRQFTATDLAPESAYIFRLSAKTRQGWGEPLEATVITTEKRERPAPPRELLVPQAEVTARSLRLQWVPGSDGASPIRYFTMQVRELPRGEWQTYSSSISHEATACVVDRLRPFTSYKLRLKATNDIGDSDFSSETEAVTTLQDVPGEPPGSVSATPHTTSSVLIQWQPPRDESLNGLLQGYRIYYRELEYEAGSGTEAKTLKNPIALHAELTAQSSFKTVNSSSTSTMCELTHLKKYRRYEVIMTAYNIIGESPASAPVEVFVGEAAPAMAPQNVQVTPLTASQLEVTWDPPPPESQNGNIQGYKIYYWEADSQNETEKMKVLFLPEPVVRLKNLTSHTKYLVSISAFNAAGDGPKSDPQQGRTHQAAPGAPSFLAFSEITSTTLNVSWGEPAAANGILQGYRVVYEPLAPVQGVSKVVTVEVRGNWQRWLKVRDLTKGVTYFFRVQARTITYGPELQANITAGPAEGSPGSPRDVLVTKSASELTLQWTEGHSGDTPTTGYVIEARPSDEGLWDMFVKDIPRSATSYTLSLDKLRQGVTYEFRVVAVNEAGYGEPSNPSTAVSAQVEAPFYEEWWFLLVMALSSLIVILLVVFALVLHGQNKKYKNCSTGKGISTMEESVTLDNGGFAALELSSRHLNVKSTFSKKNGTRSPPRPSPGGLHYSDEDICNKYNGAVLTESVSLKEKSADASESEATDSDYEDALPKHSFVNHYMSDPTYYNSWKRRAQGRAPAPHRYEAVAGSEAGAQLHPVITTQSAGGVYTPAGPGARTPLTGFSSFV

SEQ ID NO: 35331 - protein, 696 aa, Homo sapiens
  REGION 1..696: note = ENSP00000251170
MVQRYQSPVRVYKYPFELVMAAYEKRFPTCPQIPVFLGSEVLRESRSPDGAVHVVERSCRLRVDAPRLLRKIAGVEHVVFVQTNILNWKERTLLIEAHNETFANRVVVNEHCSYTVHPENEDWTCFEQSASLDIRSFFGFENALEKIAMKQYTANVKRGKEVIEHYLNELISQGTSHIPRWTPAPVREEDARNQAGPRDPSSLEAHGPRSTLGPALEAVSMDGDKLDADYIERCLGHLTPMQESCLIQLRHWLQETHKGKIPKDEHILRFLRAHDFHLDKAREMLRQSLSWRKQHQVDLLLQTWQPPALLEEFYAGGWHYQDIDGRPLYILRLGQMDTKGLMKAVGEEALLRHVLSVNEEGQKRCEGSTRQLGRPISSWTCLLDLEGLNMRHLWRPGVKALLRMIEVVEDNYPETLGRLLIVRAPRVFPVLWTLISPFINENTRRKFLIYSGSNYQGPGGLVDYLDREVIPDFLGGESVCNVPEGGLVPKSLYMTEEEQEHTDQLWQWSETYHSASVLRGAPHEVAVEILEGESVITWDFDILRGDVVFSLYHTKQAPRLGAREPGTRASGQLIDKGWVLGRDYSRVEAPLVCREGESIQGSHVTRWPGVYLLQWQMHSPPSSVACSLPGVDDVLTALHSPGPKCKLLYYCEVLASEDFRGSMSSLESCTSGFSQLSAATSSSSSGQSHSSSLVSR

SEQ ID NO: 35332 - protein, 169 aa, Homo sapiens
  REGION 1..169: note = ENSP00000468423
MVQRYQSPVRVYKYPFELVMAAYEKRFPTCPQIPVFLGSEVLRESRSPDGAVHVVERSCRLRVDAPRLLRKIAGVEHVVFVQTNILNWKERTLLIEAHNETFANRVVVNEHCSYTVHPENEDWTCFEQSASLDIRSFFGFENALEKIAMKQYTANVKRGKEVIEHYLNE

SEQ ID NO: 35333 - protein, 1032 aa, Homo sapiens
  REGION 1..1032: note = ENSP00000280551
MSQQGYVATPPYSQPQPGIGLSPPHYGHYGDPSHTASPTGMMKPAGPLGATATRGMLPPGPPPPGPHQFGQNGAHATGHPPQRFPGPPPVNNVASSHAPYQPSAQSSYPGPISTSSVTQLGSQLSAMQINSYGSGMAPPSQGPPGPLSATSLQTPPRPPQPSILQPGSQVLPPPPTTLNGPGASPLPLPMYRPDGLSGPPPPNAQYQPPPLPGQTLGAGYPPQQANSGPQMAGAQLSYPGGFPGGPAQMAGPPQPQKKLDPDSIPSPIQVIENDRASRGGQVYATNTRGQIPPLVTTDCMIQDQGNASPRFIRCTTYCFPCTSDMAKQAQIPLAAVIKPFATIPSNESPLYLVNHGESGPVRCNRCKAYMCPFMQFIEGGRRYQCGFCNCVNDVPPFYFQHLDHIGRRLDHYEKPELSLGSYEYVATLDYCRKSKPPNPPAFIFMIDVSYSNIKNGLVKLICEELKTMLEKIPKEEQEETSAIRVGFITYNKVLHFFNVKSNLAQPQMMVVTDVGEVFVPLLDGFLVNYQESQSVIHNLLDQIPDMFADSNENETVFAPVIQAGMEALKAADCPGKLFIFHSSLPTAEAPGKLKNRDDKKLVNTDKEKILFQPQTNVYDSLAKDCVAHGCSVTLFLFPSQYVDVASLGLVPQLTGGTLYKYNNFQMHLDRQQFLNDLRNDIEKKIGFDAIMRVRTSTGFRATDFFGGILMNNTTDVEMAAIDCDKAVTVEFKHDDKLSEDSGALIQCAVLYTTISGQRRLRIHNLGLNCSSQLADLYKSCETDALINFFAKSAFKAVLHQPLKVIREILVNQTAHMLACYRKNCASPSAASQLILPDSMKVLPVYMNCLLKNCVLLSRPEISTDERAYQRQLVMTMGVADSQLFFYPQLLPIHTLDVKSTMLPAAVRCSESRLSEEGIFLLANGLHMFLWLGVSSPPELIQGIFNVPSFAHINTDMTLLPEVGNPYSQQLRMIMGIIQQKRPYSMKLTIVKQREQPEMVFRQFLVEDKGLYGGSSYVDFLCCVHKEICQLLN

SEQ ID NO: 35334 - protein, 663 aa, Homo sapiens
  REGION 1..663: note = ENSP00000425491
MCPFMQFIEGGRRYQCGFCNCVNDVPPFYFQHLDHIGRRLDHYEKPELSLGSYEYVATLDYCRKSKPPNPPAFIFMIDVSYSNIKNGLVKLICEELKTMLEKIPKEEQEETSAIRVGFITYNKVLHFFNVKSNLAQPQMMVVTDVGEVFVPLLDGFLVNYQESQSVIHNLLDQIPDMFADSNENETVFAPVIQAGMEALKAADCPGKLFIFHSSLPTAEAPGKLKNRDDKKLVNTDKEKILFQPQTNVYDSLAKDCVAHGCSVTLFLFPSQYVDVASLGLVPQLTGGTLYKYNNFQMHLDRQQFLNDLRNDIEKKIGFDAIMRVRTSTGFRATDFFGGILMNNTTDVEMAAIDCDKAVTVEFKHDDKLSEDSGALIQCAVLYTTISGQRRLRIHNLGLNCSSQLADLYKSCETDALINFFAKSAFKAVLHQPLKVIREILVNQTAHMLACYRKNCASPSAASQLILPDSMKVLPVYMNCLLKNCVLLSRPEISTDERAYQRQLVMTMGVADSQLFFYPQLLPIHTLDVKSTMLPAAVRCSESRLSEEGIFLLANGLHMFLWLGVSSPPELIQGIFNVPSFAHINTDMTLLPEVGNPYSQQLRMIMGIIQQKRPYSMKLTIVKQREQPEMVFRQFLVEDKGLYGGSSYVDFLCCVHKEICQLLN

SEQ ID NO: 35335 - protein, 67 aa, Homo sapiens
  REGION 1..67: note = ENSP00000422717
MSQQGYVATPPYSQPQPGIGLSPPHYGHYGDPSHTASPTGRKLRSLKISFLPRFIQLISNQWGLELL

SEQ ID NO: 35336 - protein, 211 aa, Homo sapiens
  REGION 1..211: note = ENSP00000424085
MSQQGYVATPPYSQPQPGIGLSPPHYGHYGDPSHTASPTGMMKPAGPLGATATRGMLPPGPPPPGPHQFGQNGAHATGHPPQRFRHGSSKPGTPWPSVSHIIADSSTTSTAFHFAAWISSSSTTTHHTQWSWCLTFASTNVQTRWALWASSSKCPVPAPTSSRPDLGCWISSAAGQLWSPDGRRTTVLPRRLPWRSCTDGWSATAPEEAGS

SEQ ID NO: 35337 - protein, 305 aa, Homo sapiens
  REGION 1..305: note = ENSP00000427249
MSQQGYVATPPYSQPQPGIGLSPPHYGHYGDPSHTASPTGMMKPAGPLGATATRGMLPPGPPPPGPHQFGQNGAHATGHPPQRFPGPPPVNNVASSHAPYQPSAQSSYPGPISTSSVTQLGSQLSAMQINSYDHGKSGSSDVVRQKREDRRGKSHSTEIYINRNAVYPVQAWLLQARDPLALCQPHHCRLLHDLHSLPFCSLDLKFFHHHPPHSMVLVPHLCLYQCTDQMGSLGLLLQMPSTSPHLFQARPWVLDILRSRPTLVPRWQAHNCLTQEASLEVLHRWLVRHSPRRSWILTLSLAQSR

SEQ ID NO: 35338 - protein, 165 aa, Homo sapiens
  REGION 1..165: note = ENSP00000426309
MSQQGYVATPPYSQPQPGIGLSPPHYGHYGDPSHTASPTGMMKPAGPLGATATRGMLPPGPPPPGPHQFGQNGAHATGHPPQRFPGPPPVNNVASSHAPYQPSAQSSYPGPISTSSVTQLGSQLSAMQINSYGSGMAPPSQGPPGPLSATSLQTPPRPPQPSILQ

SEQ ID NO: 35339 - protein, 393 aa, Homo sapiens
  REGION 1..393: note = ENSP00000388324
MIDVSYSNIKNGLVKLICEELKTMLEKIPKEEQEETSAIRVGFITYNKVLHFFNVKSNLAQPQMMVVTDVGEVFVPLLDGFLVNYQESQSVIHNLLDQIPDMFADSNENETVFAPVIQAGMEALKAADCPGKLFIFHSSLPTAEAPGKLKNRDDKKLVNTDKEKILFQPQTNVYDSLAKDCVAHGCSVTLFLFPSQYVDVASLGLVPQLTGGTLYKYNNFQMHLDRQQFLNDLRNDIEKKIGFDAIMRVRTSTGFRATDFFGGILMNNTTDVEMAAIDCDKAVTVEFKHDDKLSEDSGALIQCAVLYTTISGQRRLRIHNLGLNCSSQLADLYKSCETDALINFFAKSAFKAVLHQPLKVIREILVNQTAHMLACYRKNCASPSAASQFTCEK

SEQ ID NO: 35340 - protein, 1132 aa, Homo sapiens
  REGION 1..1132: note = ENSP00000382767
MQRRGAGLGWPRQQQQQPPPLAVGPRAAAMVPSGGVPQGLGGRSACALLLLCYLNVVPSLGRQTSLTTSVIPKAEQSVAYKDFIYFTVFEGNVRNVSEVSVEYLCSQPCVVNLEAVVSSEFRSSIPVYKKRWKNEKHLHTSRTQIVHVKFPSIMVYRDDYFIRHSISVSAVIVRAWITHKYSGRDWNVKWEENLLHAVAKNYTLLQTIPPFERPFKDHQVCLEWNMGYIWNLRANRIPQCPLENDVVALLGFPYASSGENTGIVKKFPRFRNRELEATRRQRMDYPVFTVSLWLYLLHYCKANLCGILYFVDSNEMYGTPSVFLTEEGYLHIQMHLVKGEDLAVKTKFIIPLKEWFRLDISFNGGQIVVTTSIGQDLKSYHNQTISFREDFHYNDTAGYFIIGGSRYVAGIEGFFGPLKYYRLRSLHPAQIFNPLLEKQLAEQIKLYYERCAEVQEIVSVYASAAKHGGERQEACHLHNSYLDLQRRYGRPSMCRAFPWEKELKDKHPSLFQALLEMDLLTVPRNQNESVSEIGGKIFEKAVKRLSSIDGLHQISSIVPFLTDSSCCGYHKASYYLAVFYETGLNVPRDQLQGMLYSLVGGQGSERLSSMNLGYKHYQGIDNYPLDWELSYAYYSNIATKTPLDQHTLQGDQAYVETIRLKDDEILKVQTKEDGDVFMWLKHEATRGNAAAQQRLAQMLFWGQQGVAKNPEAAIEWYAKGALETEDPALIYDYAIVLFKGQGVKKNRRLALELMKKAASKGLHQAVNGLGWYYHKFKKNYAKAAKYWLKAEEMGNPDASYNLGVLHLDGIFPGVPGRNQTLAGEYFHKAAQGGHMEGTLWCSLYYITGNLETFPRDPEKAVVWAKHVAEKNGYLGHVIRKGLNAYLEGSWHEALLYYVLAAETGIEVSQTNLAHICEERPDLARRYLGVNCVWRYYNFSVFQIDAPSFAYLKMGDLYYYGHQNQSQDLELSVQMYAQAALDGDSQGFFNLALLIEEGTIIPHHILDFLEIDSTLHSNNISILQELYERCWSHSNEESFSPCSLAWLYLHLRLLWGAILHSALIYFLGTFLLSILIAWTVQYFQSVSASDPPPRPSQASPDTATSTASPAVTPAADASDQDQPTVTNNPEPRG

SEQ ID NO: 35341 - protein, 1097 aa, Homo sapiens
  REGION 1..1097: note = ENSP00000264868
MAPRPKKQPDKNPLHGRELNVVPSLGRQTSLTTSVIPKAEQSVAYKDFIYFTVFEGNVRNVSEVSVEYLCSQPCVVNLEAVVSSEFRSSIPVYKKRWKNEKHLHTSRTQIVHVKFPSIMVYRDDYFIRHSISVSAVIVRAWITHKYSGRDWNVKWEENLLHAVAKNYTLLQTIPPFERPFKDHQVCLEWNMGYIWNLRANRIPQCPLENDVVALLGFPYASSGENTGIVKKFPRFRNRELEATRRQRMDYPVFTVSLWLYLLHYCKANLCGILYFVDSNEMYGTPSVFLTEEGYLHIQMHLVKGEDLAVKTKFIIPLKEWFRLDISFNGGQIVVTTSIGQDLKSYHNQTISFREDFHYNDTAGYFIIGGSRYVAGIEGFFGPLKYYRLRSLHPAQIFNPLLEKQLAEQIKLYYERCAEVQEIVSVYASAAKHGGERQEACHLHNSYLDLQRRYGRPSMCRAFPWEKELKDKHPSLFQALLEMDLLTVPRNQNESVSEIGGKIFEKAVKRLSSIDGLHQISSIVPFLTDSSCCGYHKASYYLAVFYETGLNVPRDQLQGMLYSLVGGQGSERLSSMNLGYKHYQGIDNYPLDWELSYAYYSNIATKTPLDQHTLQGDQAYVETIRLKDDEILKVQTKEDGDVFMWLKHEATRGNAAAQQRLAQMLFWGQQGVAKNPEAAIEWYAKGALETEDPALIYDYAIVLFKGQGVKKNRRLALELMKKAASKGLHQAVNGLGWYYHKFKKNYAKAAKYWLKAEEMGNPDASYNLGVLHLDGIFPGVPGRNQTLAGEYFHKAAQGGHMEGTLWCSLYYITGNLETFPRDPEKAVVWAKHVAEKNGYLGHVIRKGLNAYLEGSWHEALLYYVLAAETGIEVSQTNLAHICEERPDLARRYLGVNCVWRYYNFSVFQIDAPSFAYLKMGDLYYYGHQNQSQDLELSVQMYAQAALDGDSQGFFNLALLIEEGTIIPHHILDFLEIDSTLHSNNISILQELYERCWSHSNEESFSPCSLAWLYLHLRLLWGAILHSALIYFLGTFLLSILIAWTVQYFQSVSASDPPPRPSQASPDTATSTASPAVTPAADASDQDQPTVTNNPEPRG

SEQ ID NO: 35342 - protein, 979 aa, Homo sapiens
  REGION 1..979: note = ENSP00000425438
MVYRDDYFIRHSISVSAVIVRAWITHKYSGRDWNVKWEENLLHAVAKNYTLLQTIPPFERPFKDHQVCLEWNMGYIWNLRANRIPQCPLENDVVALLGFPYASSGENTGIVKKFPRFRNRELEATRRQRMDYPVFTVSLWLYLLHYCKANLCGILYFVDSNEMYGTPSVFLTEEGYLHIQMHLVKGEDLAVKTKFIIPLKEWFRLDISFNGGQIVVTTSIGQDLKSYHNQTISFREDFHYNDTAGYFIIGGSRYVAGIEGFFGPLKYYRLRSLHPAQIFNPLLEKQLAEQIKLYYERCAEVQEIVSVYASAAKHGGERQEACHLHNSYLDLQRRYGRPSMCRAFPWEKELKDKHPSLFQALLEMDLLTVPRNQNESVSEIGGKIFEKAVKRLSSIDGLHQISSIVPFLTDSSCCGYHKASYYLAVFYETGLNVPRDQLQGMLYSLVGGQGSERLSSMNLGYKHYQGIDNYPLDWELSYAYYSNIATKTPLDQHTLQGDQAYVETIRLKDDEILKVQTKEDGDVFMWLKHEATRGNAAAQQRLAQMLFWGQQGVAKNPEAAIEWYAKGALETEDPALIYDYAIVLFKGQGVKKNRRLALELMKKAASKGLHQAVNGLGWYYHKFKKNYAKAAKYWLKAEEMGNPDASYNLGVLHLDGIFPGVPGRNQTLAGEYFHKAAQGGHMEGTLWCSLYYITGNLETFPRDPEKAVVWAKHVAEKNGYLGHVIRKGLNAYLEGSWHEALLYYVLAAETGIEVSQTNLAHICEERPDLARRYLGVNCVWRYYNFSVFQIDAPSFAYLKMGDLYYYGHQNQSQDLELSVQMYAQAALDGDSQGFFNLALLIEEGTIIPHHILDFLEIDSTLHSNNISILQELYERCWSHSNEESFSPCSLAWLYLHLRLLWGAILHSALIYFLGTFLLSILIAWTVQYFQSVSASDPPPRPSQASPDTATSTASPAVTPAADASDQDQPTVTNNPEPRG

SEQ ID NO: 35343 - protein, 130 aa, Homo sapiens
  REGION 1..130: note = ENSP00000421701
  VARIANT 1: note = Any amino acid
XYAQAALDGDSQGFFNLALLIEEGTIIPHHILDFLEIDSTLHSNNISILQELYERCWSHSNEESFSPCSLAWLYLHLRLLWGAILHSALIYFLGTFLLSILIAWTVQYFQSVSEFCLCVPENTAPKLLAA

SEQ ID NO: 35344 - protein, 130 aa, Homo sapiens
  REGION 1..130: note = ENSP00000426050
TNLAHICEERPDLARRYLGVNCVWRYYNFSVFQIDAPSFAYLKMGDLYYYGHQNQSQDLELSVQMYAQAALDGDSQGFFNLALLIEEGTIIPHHILDFLEIDSTLHSNNISILQELYERSTFWEPFCYPY

SEQ ID NO: 35345 - protein, 77 aa, Homo sapiens
  REGION 1..77: note = ENSP00000424564
TLAGEYFHKAAQGGHMEGTLWCSLYYITGNLETFPRDPEKAVVKSLSTSVLGHPHTDTLALQKIVLHNTFGFKFNLT

SEQ ID NO: 35346 - protein, 75 aa, Homo sapiens
  REGION 1..75: note = ENSP00000423743
MVYRDDYFIRHSISVSAVIVRAWITHKYSGRDWNVKWEENLLHAVAKNYTLLQTIPPFERPFKDHQVCLEWNMGY

SEQ ID NO: 35347 - protein, 62 aa, Homo sapiens
  REGION 1..62: note = ENSP00000421567
MVYRDDYFIRHSISVSAVIVRAWITHKYSGRDWNVKWEENLLHAVAKNYTLLQTIPPFERPF

SEQ ID NO: 35348 - protein, 35 aa, Homo sapiens
  REGION 1..35: note = ENSP00000420951
MVYRDDYFIRHSISVSAVIVRAWITHKYSGRDWNV

SEQ ID NO: 35349 - protein, 94 aa, Homo sapiens
  REGION 1..94: note = ENSP00000418813
  MOD_RES 92: note = Selenocysteine
MVYISNGQVLDSRSQSPWRLSLITDFFWGIAEFVVLFFKTLLQQDVKKRRSYGNSSDSRYDDGRGPPGNPPRRMGRINHLRGPSPPPMAGGXGR

SEQ ID NO: 35350 - protein, 72 aa, Homo sapiens
  REGION 1..72: note = ENSP00000417272
MVYISNGQVLDSRSQSPWRLSLITDFFWGIAEFVVLFFKTLLQQDVKKRRSYGNSSDSRYDDGRGKPSPKNG

SEQ ID NO: 35351 - protein, 93 aa, Homo sapiens
  REGION 1..93: note = ENSP00000443164
MVYISNGQVLDSRSQSPWRLSLITDFFWGIAEFVVLFFKTLLQQDVKKRRSYGNSSDSRYDDGRGPPGNPPRRMGRINHLRGPSPPPMAGGGR

SEQ ID NO: 35352 - protein, 145 aa, Homo sapiens
  REGION 1..145: note = ENSP00000384564
  MOD_RES 48: note = Selenocysteine
MSLLLPPLALLLLLAALVAPATAATAYRPDWNRLSGLTRARVETCGGXQLNRLKEVKAFVTQDIPFYHNLVMKHLPGADPELVLLGRRYEELERIPLSEMTREEINALVQELGFYRKAAPDAQVPPEYVWAPAKPPEETSDHADL

SEQ ID NO: 35353 - protein, 145 aa, Homo sapiens; identical to SEQ ID NO: 35352
  REGION 1..145: note = ENSP00000383155
  MOD_RES 48: note = Selenocysteine

SEQ ID NO: 35354 - protein, 144 aa, Homo sapiens
  REGION 1..144: note = ENSP00000480176
MSLLLPPLALLLLLAALVAPATAATAYRPDWNRLSGLTRARVETCGGQLNRLKEVKAFVTQDIPFYHNLVMKHLPGADPELVLLGRRYEELERIPLSEMTREEINALVQELGFYRKAAPDAQVPPEYVWAPAKPPEETSDHADL

SEQ ID NO: 35355 - protein, 412 aa, Homo sapiens
  REGION 1..412: note = ENSP00000447752
MPLQLLLLLILLGPGNSLQLWDTWADEAEKALGPLLARDRRQATEYEYLDYDFLPETEPPEMLRNSTDTTPLTGPGTPESTTVEPAARRSTGLDAGGAVTELTTELANMGNLSTDSAAMEIQTTQPAATEAQTTQPVPTEAQTTPLAATEAQTTRLTATEAQTTPLAATEAQTTPPAATEAQTTQPTGLEAQTTAPAAMEAQTTAPAAMEAQTTPPAAMEAQTTQTTAMEAQTTAPEATEAQTTQPTATEAQTTPLAAMEALSTEPSATEALSMEPTTKRGLFIPFSVSSVTHKGIPMAASNLSVNYPVGAPDHISVKQCLLAILILALVATIFFVCTVVLAVRLSRKGHMYPVRNYSPTEMVCISSLLPDGGEGPSATANGGLSKAKSPGLTPEPREDREGDDLTLHSFLP

SEQ ID NO: 35356 - protein, 428 aa, Homo sapiens
  REGION 1..428: note = ENSP00000228463
MAVGASGLEGDKMAGAMPLQLLLLLILLGPGNSLQLWDTWADEAEKALGPLLARDRRQATEYEYLDYDFLPETEPPEMLRNSTDTTPLTGPGTPESTTVEPAARRSTGLDAGGAVTELTTELANMGNLSTDSAAMEIQTTQPAATEAQTTQPVPTEAQTTPLAATEAQTTRLTATEAQTTPLAATEAQTTPPAATEAQTTQPTGLEAQTTAPAAMEAQTTAPAAMEAQTTPPAAMEAQTTQTTAMEAQTTAPEATEAQTTQPTATEAQTTPLAAMEALSTEPSATEALSMEPTTKRGLFIPFSVSSVTHKGIPMAASNLSVNYPVGAPDHISVKQCLLAILILALVATIFFVCTVVLAVRLSRKGHMYPVRNYSPTEMVCISSLLPDGGEGPSATANGGLSKAKSPGLTPEPREDREGDDLTLHSFLP

SEQ ID NO: 35357 - protein, 402 aa, Homo sapiens
  REGION 1..402: note = ENSP00000373614
MPLQLLLLLILLGPGNSLQLWDTWADEAEKALGPLLARDRRQATEYEYLDYDFLPETEPPEMLRNSTDTTPLTGPGTPESTTVEPAARRSTGLDAGGAVTELTTELANMGNLSTDSAAMEIQTTQPAATEAQTTPLAATEAQTTRLTATEAQTTPLAATEAQTTPPAATEAQTTQPTGLEAQTTAPAAMEAQTTAPAAMEAQTTPPAAMEAQTTQTTAMEAQTTAPEATEAQTTQPTATEAQTTPLAAMEALSTEPSATEALSMEPTTKRGLFIPFSVSSVTHKGIPMAASNLSVNYPVGAPDHISVKQCLLAILILALVATIFFVCTVVLAVRLSRKGHMYPVRNYSPTEMVCISSLLPDGGEGPSATANGGLSKAKSPGLTPEPREDREGDDLTLHSFLP

SEQ ID NO: 35358 - protein, 214 aa, Homo sapiens
  REGION 1..214: note = ENSP00000482586
MGRAGAAAVIPGLALLWAVGLGSAAPSPPRLRLSFQELQAWHGLQTFSLERTCCYQALLVDEERGRLFVGAENHVASLNLDNISKRAKKLAWPAPVEWREECNWAGKDIGTECMNFVKLLHAYNRTHLLACGTGAFHPTCAFVEVGHRAEEPVLRLDPGRIEDGKGKSPYDPRHRAASVLVGEELYSGVAADLMGRDFTIFRSLGQRPSLRTEP

SEQ ID NO: 35359 - protein, 749 aa, Homo sapiens
  REGION 1..749: note = ENSP00000484146
MGRAGAAAVIPGLALLWAVGLGSAAPSPPRLRLSFQELQAWHGLQTFSLERTCCYQALLVDEERGRLFVGAENHVASLNLDNISKRAKKLAWPAPVEWREECNWAGKDIGTECMNFVKLLHAYNRTHLLACGTGAFHPTCAFVEVGHRAEEPVLRLDPGRIEDGKGKSPYDPRHRAASVLVGEELYSGVAADLMGRDFTIFRSLGQRPSLRTEPHDSRWLNEPKFVKVFWIPESENPDDDKIYFFFRETAVEAAPALGRLSVSRVGQICRNDVGGQRSLVNKWTTFLKARLVCSVPGVEGDTHFDQLQDVFLLSSRDHRTPLLYAVFSTSSSIFQGSAVCVYSMNDVRRAFLGPFAHKEGPMHQWVSYQGRVPYPRPGMCPSKTFGTFSSTKDFPDDVIQFARNHPLMYNSVLPTGGRPLFLQVGANYTFTQIAADRVAAADGHYDVLFIGTDVGTVLKVISVPKGSRPSAEGLLLEELHVFEDSAAVTSMQISSKRHQLYVASRSAVAQIALHRCAAHGRVCTECCLARDPYCAWDGVACTRFQPSAKRRFRRQDVRNGDPSTLCSGDSSRPALLEHKVFGVEGSSAFLECEPRSLQARVEWTFQRAGVTAHTQVLAEERTERTARGLLLRRLRRRDSGVYLCAAVEQGFTQPLRRLSLHVLSATQAERLARAEEAAPAAPPGPKLWYRDFLQLVEPGGGGSANSLRMCRPQPALQSLPLESRRKGRNRRTHAPEPRAERGPRSATHW

SEQ ID NO: 35360 - protein, 748 aa, Homo sapiens
  REGION 1..748: note = ENSP00000485281
MGRAGAAAVIPGLALLWAVGLGSAAPSPPRLRLSFQELQAWHGLQTFSLERTCCYQALLVDEERGRLFVGAENHVASLNLDNISKRAKKLAWPAPVEWREECNWAGKDIGTECMNFVKLLHAYNRTHLLACGTGAFHPTCAFVEVGHRAEEPVLRLDPGRIEDGKGKSPYDPRHRAASVLVGEELYSGVAADLMGRDFTIFRSLGQRPSLRTEPHDSRWLNEPKFVKVFWIPESENPDDDKIYFFFRETAVEAAPALGRLSVSRVGQICRNDVGGQRSLVNKWTTFLKARLVCSVPGVEGDTHFDQLQDVFLLSSRDHRTPLLYAVFSTSSIFQGSAVCVYSMNDVRRAFLGPFAHKEGPMHQWVSYQGRVPYPRPGMCPSKTFGTFSSTKDFPDDVIQFARNHPLMYNSVLPTGGRPLFLQVGANYTFTQIAADRVAAADGHYDVLFIGTDVGTVLKVISVPKGSRPSAEGLLLEELHVFEDSAAVTSMQISSKRHQLYVASRSAVAQIALHRCAAHGRVCTECCLARDPYCAWDGVACTRFQPSAKRRFRRQDVRNGDPSTLCSGDSSRPALLEHKVFGVEGSSAFLECEPRSLQARVEWTFQRAGVTAHTQVLAEERTERTARGLLLRRLRRRDSGVYLCAAVEQGFTQPLRRLSLHVLSATQAERLARAEEAAPAAPPGPKLWYRDFLQLVEPGGGGSANSLRMCRPQPALQSLPLESRRKGRNRRTHAPEPRAERGPRSATHW

SEQ ID NO: 35361 - protein, 754 aa, Homo sapiens
  REGION 1..754: note = ENSP00000480680
MGRAGAAAVIPGLALLWAVGLGSAAPSPPRLRLSFQELQAWHGLQTFSLERTCCYQALLVDEERGRLFVGAENHVASLNLDNISKRAKKLAWPAPVEWREECNWAGKDIGTECMNFVKLLHAYNRTHLLACGTGAFHPTCAFVEVGHRAEEPVLRLDPGRIEDGKGKSPYDPRHRAASVLVGEELYSGVAADLMGRDFTIFRSLGQRPSLRTEPHDSRWLNEPKFVKVFWIPESENPDDDKIYFFFRETAVEAAPALGRLSVSRVGQICRNDVGGQRSLVNKWTTFLKARLVCSVPGVEGDTHFDQLRPFPAEDVFLLSSRDHRTPLLYAVFSTSSSIFQGSAVCVYSMNDVRRAFLGPFAHKEGPMHQWVSYQGRVPYPRPGMCPSKTFGTFSSTKDFPDDVIQFARNHPLMYNSVLPTGGRPLFLQVGANYTFTQIAADRVAAADGHYDVLFIGTDVGTVLKVISVPKGSRPSAEGLLLEELHVFEDSAAVTSMQISSKRHQLYVASRSAVAQIALHRCAAHGRVCTECCLARDPYCAWDGVACTRFQPSAKRRFRRQDVRNGDPSTLCSGDSSRPALLEHKVFGVEGSSAFLECEPRSLQARVEWTFQRAGVTAHTQVLAEERTERTARGLLLRRLRRRDSGVYLCAAVEQGFTQPLRRLSLHVLSATQAERLARAEEAAPAAPPGPKLWYRDFLQLVEPGGGGSANSLRMCRPQPALQSLPLESRRKGRNRRTHAPEPRAERGPRSATHW

SEQ ID NO: 35362 - protein, 406 aa, Homo sapiens
  REGION 1..406: note = ENSP00000485646
MNDVRRAFLGPFAHKEGPMHQWVSYQGRVPYPRPGMCPSKTFGTFSSTKDFPDDVIQFARNHPLMYNSVLPTGGRPLFLQVGANYTFTQIAADRVAAADGHYDVLFIGTDVGTVLKVISVPKGSRPSAEGLLLEELHVFEDSAAVTSMQISSKRHQLYVASRSAVAQIALHRCAAHGRVCTECCLARDPYCAWDGVACTRFQPSAKRRFRRQDVRNGDPSTLCSGDSSRPALLEHKVFGVEGSSAFLECEPRSLQARVEWTFQRAGVTAHTQVLAEERTERTARGLLLRRLRRRDSGVYLCAAVEQGFTQPLRRLSLHVLSATQAERLARAEEAAPAAPPGPKLWYRDFLQLVEPGGGGSANSLRMCRPQPALQSLPLESRRKGRNRRTHAPEPRAERGPRSATHW

SEQ ID NO: 35363 - protein, 406 aa, Homo sapiens; identical to SEQ ID NO: 35362
  REGION 1..406: note = ENSP00000485173

SEQ ID NO: 35364 - protein, 749 aa, Homo sapiens; identical to SEQ ID NO: 35359
  REGION 1..749: note = ENSP00000481957

SEQ ID NO: 35365 - protein, 751 aa, Homo sapiens
  REGION 1..751: note = ENSP00000265361
MAFRTICVLVGVFICSICVKGSSQPQARVYLTFDELRETKTSEYFSLSHHPLDYRILLMDEDQDRIYVGSKDHILSLNINNISQEALSVFWPASTIKVEECKMAGKDPTHGCGNFVRVIQTFNRTHLYVCGSGAFSPVCTYLNRGRRSEDQVFMIDSKCESGKGRCSFNPNVNTVSVMINEELFSGMYIDFMGTDAAIFRSLTKRNAVRTDQHNSKWLSEPMFVDAHVIPDGTDPNDAKVYFFFKEKLTDNNRSTKQIHSMIARICPNDTGGLRSLVNKWTTFLKARLVCSVTDEDGPETHFDELEDVFLLETDNPRTTLVYGIFTTSSSVFKGSAVCVYHLSDIQTVFNGPFAHKEGPNHQLISYQGRIPYPRPGTCPGGAFTPNMRTTKEFPDDVVTFIRNHPLMYNSIYPIHKRPLIVRIGTDYKYTKIAVDRVNAADGRYHVLFLGTDRGTVQKVVVLPTNNSVSGELILEELEVFKNHAPITTMKISSKKQQLYVSSNEGVSQVSLHRCHIYGTACADCCLARDPYCAWDGHSCSRFYPTGKRRSRRQDVRHGNPLTQCRGFNLKAYRNAAEIVQYGVKNNTTFLECAPKSPQASIKWLLQKDKDRRKEVKLNERIIATSQGLLIRSVQGSDQGLYHCIATENSFKQTIAKINFKVLDSEMVAVVTDKWSPWTWASSVRALPFHPKDIMGAFSHSEMQMINQYCKDTRQQHQQGDESQKMRGDYGKLKALINSRKSRNRRNQLPES

SEQ ID NO: 35366 - protein, 751 aa, Homo sapiens; identical to SEQ ID NO: 35365
  REGION 1..751: note = ENSP00000411193

SEQ ID NO: 35367 - protein, 40 aa, Homo sapiens
  REGION 1..40: note = ENSP00000393825
MAFRTICVLVGVFICSICVKGSSQPQARVYLTFDGPSFHD

SEQ ID NO: 35368 - protein, 63 aa, Homo sapiens
  REGION 1..63: note = ENSP00000395398
MAFRTICVLVGVFICSICVKGSSQPQARVYLTFDEPTLYNAVCYICGYKKKCGVNLVLSNHLL

SEQ ID NO: 35369 - protein, 63 aa, Homo sapiens; identical to SEQ ID NO: 35368
  REGION 1..63: note = ENSP00000399891

SEQ ID NO: 35370 - protein, 777 aa, Homo sapiens
  REGION 1..777: note = ENSP00000284136
MNANKDERLKARSQDFHLFPALMMLSMTMLFLPVTGTLKQNIPRLKLTYKDLLLSNSCIPFLGSSEGLDFQTLLLDEERGRLLLGAKDHIFLLSLVDLNKNFKKIYWPAAKERVELCKLAGKDANTECANFIRVLQPYNKTHIYVCGTGAFHPICGYIDLGVYKEDIIFKLDTHNLESGRLKCPFDPQQPFASVMTDEYLYSGTASDFLGKDTAFTRSLGPTHDHHYIRTDISEHYWLNGAKFIGTFFIPDTYNPDDDKIYFFFRESSQEGSTSDKTILSRVGRVCKNDVGGQRSLINKWTTFLKARLICSIPGSDGADTYFDELQDIYLLPTRDERNPVVYGVFTTTSSIFKGSAVCVYSMADIRAVFNGPYAHKESADHRWVQYDGRIPYPRPGTCPSKTYDPLIKSTRDFPDDVISFIKRHSVMYKSVYPVAGGPTFKRINVDYRLTQIVVDHVIAEDGQYDVMFLGTDIGTVLKVVSISKEKWNMEEVVLEELQIFKHSSIILNMELSLKQQQLYIGSRDGLVQLSLHRCDTYGKACADCCLARDPYCAWDGNACSRYAPTSKRRARRQDVKYGDPITQCWDIEDSISHETADEKVIFGIEFNSTFLECIPKSQQATIKWYIQRSGDEHREELKPDERIIKTEYGLLIRSLQKKDSGMYYCKAQEHTFIHTIVKLTLNVIENEQMENTQRAEHEEGKVKDLLAESRLRYKDYIQILSSPNFSLDQYCEQMWHREKRRQRNKGGPKWKHMQEMKKKRNRRHHRDLDELPRAVAT

SEQ ID NO: 35371 - protein, 294 aa, Homo sapiens
  REGION 1..294: note = ENSP00000401366
MNANKDERLKARSQDFHLFPALMMLSMTMLFLPVTGTLKQNIPRLKLTYKDLLLSNSCIPFLGSSEGLDFQTLLLDEERGRLLLGAKDHIFLLSLVDLNKNFKKIYWPAAKERVELCKLAGKDANTECANFIRVLQPYNKTHIYVCGTGAFHPICGYIDLGVYKEDIIFKLDTHNLESGRLKCPFDPQQPFASVMTDEYLYSGTASDFLGKDTAFTRSLGPTHDHHYIRTDISEHYWLNGAKFIGTFFIPDTYNPDDDKIYFFFRESSQEGSTSDKTILSRVGRVCKENLCFED

SEQ ID NO: 35372 - protein, 775 aa, Homo sapiens
  REGION 1..775: note = ENSP00000303212
MASAGHIITLLLWGYLLELWTGGHTADTTHPRLRLSHKELLNLNRTSIFHSPFGFLDLHTMLLDEYQERLFVGGRDLVYSLSLERISDGYKEIHWPSTALKMEECIMKGKDAGECANYVRVLHHYNRTHLLTCGTGAFDPVCAFIRVGYHLEDPLFHLESPRSERGRGRCPFDPSSSFISTLIGSELFAGLYSDYWSRDAAIFRSMGRLAHIRTEHDDERLLKEPKFVGSYMIPDNEDRDDNKVYFFFTEKALEAENNAHAIYTRVGRLCVNDVGGQRILVNKWSTFLKARLVCSVPGMNGIDTYFDELEDVFLLPTRDHKNPVIFGLFNTTSNIFRGHAICVYHMSSIRAAFNGPYAHKEGPEYHWSVYEGKVPYPRPGSCASKVNGGRYGTTKDYPDDAIRFARSHPLMYQAIKPAHKKPILVKTDGKYNLKQIAVDRVEAEDGQYDVLFIGTDNGIVLKVITIYNQEMESMEEVILEELQIFKDPVPIISMEISSKRQQLYIGSASAVAQVRFHHCDMYGSACADCCLARDPYCAWDGISCSRYYPTGTHAKRRFRRQDVRHGNAAQQCFGQQFVGDALDKTEEHLAYGIENNSTLLECTPRSLQAKVIWFVQKGRETRKEEVKTDDRVVKMDLGLLFLRLHKSDAGTYFCQTVEHSFVHTVRKITLEVVEEEKVEDMFNKDDEEDRHHRMPCPAQSSISQGAKPWYKEFLQLIGYSNFQRVEEYCEKVWCTDRKRKKLKMSPSKWKYANPQEKKLRSKPEHYRLPRHTLDS

SEQ ID NO: 35373 - protein, 715 aa, Homo sapiens
  REGION 1..715: note = ENSP00000405052
MLLDEYQERLFVGGRDLVYSLSLERISDGYKEIHWPSTALKMEECIMKGKDAGECANYVRVLHHYNRTHLLTCGTGAFDPVCAFIRVGYHLEDPLFHLESPRSERGRGRCPFDPSSSFISTLIGSELFAGLYSDYWSRDAAIFRSMGRLAHIRTEHDDERLLKEPKFVGSYMIPDNEDRDDNKVYFFFTEKALEAENNAHAIYTRVGRLCVNDVGGQRILVNKWSTFLKARLVCSVPGMNGIDTYFDELEDVFLLPTRDHKNPVIFGLFNTTSNIFRGHAICVYHMSSIRAAFNGPYAHKEGPEYHWSVYEGKVPYPRPGSCASKVNGGRYGTTKDYPDDAIRFARSHPLMYQAIKPAHKKPILVKTDGKYNLKQIAVDRVEAEDGQYDVLFIGTDNGIVLKVITIYNQEMESMEEVILEELQIFKDPVPIISMEISSKRQQLYIGSASAVAQVRFHHCDMYGSACADCCLARDPYCAWDGISCSRYYPTGTHAKRRFRRQDVRHGNAAQQCFGQQFVGDALDKTEEHLAYGIENNSTLLECTPRSLQAKVIWFVQKGRETRKEEVKTDDRVVKMDLGLLFLRLHKSDAGTYFCQTVEHSFVHTVRKITLEVVEEEKVEDMFNKDDEEDRHHRMPCPAQSSISQGAKPWYKEFLQLIGYSNFQRVEEYCEKVWCTDRKRKKLKMSPSKWKYANPQEKKLRSKPEHYRLPRHTLDS

SEQ ID NO: 35374 - protein, 163 aa, Homo sapiens
  REGION 1..163: note = ENSP00000412867
MLLDEYQERLFVGGRDLVYSLSLERISDGYKEIHWPSTALKMEECIMKGKDAGECANYVRVLHHYNRTHLLTCGTGAFDPVCAFIRVGYHLEDPLFHLESPRSERGRGRCPFDPSSSFISTLIGSELFAGLYSDYWSRDAAIFRSMGRLAHIRTEHDDERLLK

SEQ ID NO: 35375 - protein, 39 aa, Homo sapiens
  REGION 1..39: note = ENSP00000415184
MASAGHIITLLLWGYLLELWTGGHTADTTHPRLRLSHKE

SEQ ID NO: 35376 - protein, 782 aa, Homo sapiens
  REGION 1..782: note = ENSP00000231721
MAPSAWAICWLLGGLLLHGGSSGPSPGPSVPRLRLSYRDLLSANRSAIFLGPQGSLNLQAMYLDEYRDRLFLGGLDALYSLRLDQAWPDPREVLWPPQPGQREECVRKGRDPLTECANFVRVLQPHNRTHLLACGTGAFQPTCALITVGHRGEHVLHLEPGSVESGRGRCPHEPSRPFASTFIDGELYTGLTADFLGREAMIFRSGGPRPALRSDSDQSLLHDPRFVMAARIPENSDQDNDKVYFFFSETVPSPDGGSNHVTVSRVGRVCVNDAGGQRVLVNKWSTFLKARLVCSVPGPGGAETHFDQLEDVFLLWPKAGKSLEVYALFSTVSAVFQGFAVCVYHMADIWEVFNGPFAHRDGPQHQWGPYGGKVPFPRPGVCPSKMTAQPGRPFGSTKDYPDEVLQFARAHPLMFWPVRPRHGRPVLVKTHLAQQLHQIVVDRVEAEDGTYDVIFLGTDSGSVLKVIALQAGGSAEPEEVVLEELQVFKVPTPITEMEISVKRQMLYVGSRLGVAQLRLHQCETYGTACAECCLARDPYCAWDGASCTHYRPSLGKRRFRRQDIRHGNPALQCLGQSQEEEAVGLVAATMVYGTEHNSTFLECLPKSPQAAVRWLLQRPGDEGPDQVKTDERVLHTERGLLFRRLSRFDAGTYTCTTLEHGFSQTVVRLALVVIVASQLDNLFPPEPKPEEPPARGGLASTPPKAWYKDILQLIGFANLPRVDEYCERVWCRGTTECSGCFRSRSRGKQARGKSWAGLELGKKMKSRVHAEHNRTPREVEAT

SEQ ID NO: 35377 - protein, 99 aa, Homo sapiens
  REGION 1..99: note = ENSP00000420291
  VARIANT 1: note = Any amino acid
XSSGPSPGPSVPRLRLSYRDRVRQLRAGATASQPDPPASLWHWGLPAHLCPHHSWPPWGACAPPGAWQCGKWPGAVPSRAQPSLCQHLHRRGAVHGSHC

SEQ ID NO: 35378 - protein, 186 aa, Homo sapiens
  REGION 1..186: note = ENSP00000419181
MAPSAWAICWLLGGLLLHGGSSGPSPGPSVPRLRLSYRGAMVRKPSSTMWMETFSRYLLSANRSAIFLGPQGSLNLQAMYLDEYRDRLFLGGLDALYSLRLDQAWPDPREVLWPPQPGQREECVRKGRDPLTECANFVRVLQPHNRTHLLACGTGAFQPTCALITVGHRGEHVLHLEPGSVESGRG

SEQ ID NO: 35379 - protein, 548 aa, Homo sapiens
  REGION 1..548: note = ENSP00000446394
MRMCTPIRGLLMALAVMFGTAMAFAPIPRITWEHREVHLVQFHEPDIYNYSALLLSEDKDTLYIGAREAVFAVNALNISEKQHEVYWKVSEDKKAKCAEKGKSKQTECLNYIRVLQPLSATSLYVCGTNAFQPACDHLNLTSFKFLGKNEDGKGRCPFDPAHSYTSVMVDGELYSGTSYNFLGSEPIISRNSSHSPLRTEYAIPWLNEPSFVFADVIRKSPDSPDGEDDRVYFFFTEVSVEYEFVFRVLIPRIARVCKGDQGGLRTLQKKWTSFLKARLICSRPDSGLVFNVLRDVFVLRSPGLKVPVFYALFTPQLNNVGLSAVCAYNLSTAEEVFSHGKYMQSTTVEQSHTKWVRYNGPVPKPRPGACIDSEARAANYTSSLNLPDKTLQFVKDHPLMDDSVTPIDNRPRLIKKDVNYTQIVVDRTQALDGTVYDVMFVSTDRGALHKAISLEHAVHIIEETQLFQDFEPVQTLLLSSKKVLQTFALSGRRMGELWRPVSLCRPMHCPMAGPMHSAGCRTPSGKALSIAALSSPQQGTRLRRCRLL

SEQ ID NO: 35380 - protein, 862 aa, Homo sapiens
  REGION 1..862: note = ENSP00000416523
MRMCTPIRGLLMALAVMFGTAMAFAPIPRITWEHREVHLVQFHEPDIYNYSALLLSEDKDTLYIGAREAVFAVNALNISEKQHEVYWKVSEDKKAKCAEKGKSKQTECLNYIRVLQPLSATSLYVCGTNAFQPACDHLNLTSFKFLGKNEDGKGRCPFDPAHSYTSVMVDGELYSGTSYNFLGSEPIISRNSSHSPLRTEYAIPWLNEPSFVFADVIRKSPDSPDGEDDRVYFFFTEVSVEYEFVFRVLIPRIARVCKGDQGGLRTLQKKWTSFLKARLICSRPDSGLVFNVLRDVFVLRSPGLKVPVFYALFTPQLNNVGLSAVCAYNLSTAEEVFSHGKYMQSTTVEQSHTKWVRYNGPVPKPRPGACIDSEARAANYTSSLNLPDKTLQFVKDHPLMDDSVTPIDNRPRLIKKDVNYTQIVVDRTQALDGTVYDVMFVSTDRGALHKAISLEHAVHIIEETQLFQDFEPVQTLLLSSKKGNRFVYAGSNSGVVQAPLAFCGKHGTCEDCVLARDPYCAWSPPTATCVALHQTESPSRGLIQEMSGDASVCPDKSKGSYRQHFFKHGGTAELKCSQKSNLARVFWKFQNGVLKAESPKYGLMGRKNLLIFNLSEGDSGVYQCLSEERVKNKTVFQVVAKHVLEVKVVPKPVVAPTLSVVQTEGSRIATKVLVASTQGSSPPTPAVQATSSGAITLPPKPAPTGTSCEPKIVINTVPQLHSEKTMYLKSSDNRLLMSLFLFFFVLFLCLFFYNCYKGYLPRQCLKFRSALLIGKKKPKSDFCDREQSLKETLVEPGSFSQQNGEHPKPALDTGYETEQDTITSKVPTDREDSQRIDDLSARDKPFDVKCELKFADSDADGD

SEQ ID NO: 35381 - protein, 862 aa, Homo sapiens; identical to SEQ ID NO: 35380
  REGION 1..862: note = ENSP00000405102

SEQ ID NO: 35382 - protein, 862 aa, Homo sapiens; identical to SEQ ID NO: 35380
  REGION 1..862: note = ENSP00000388768

SEQ ID NO: 35383 - protein, 146 aa, Homo sapiens
  REGION 1..146: note = ENSP00000390754
MRMCTPIRGLLMALAVMFGTAMAFAPIPRITWEHREVHLVQFHEPDIYNYSALLLSEDKDTLYIGAREAVFAVNALNISEKQHEVYWKVSEDKKAKCAEKGKSKQTECLNYIRVLQPLSATSLYVCGTNAFQPACDHLNLTSFKFL

SEQ ID NO: 35384 - protein, 75 aa, Homo sapiens
  REGION 1..75: note = ENSP00000413352
MRMCTPIRGLLMALAVMFGTAMAFAPIPRITWEHREVHLVQFHEPDIYNYSALLLSEDKDTLYIGAREAVFAVNA

SEQ ID NO: 35385 - protein, 66 aa, Homo sapiens
  REGION 1..66: note = ENSP00000438389
MRMCTPIRGLLMALAVMFGTAMAFAPIPRITWEHREVHLVQFHEPDIYNYSALLLSEDKDTLYIGA

SEQ ID NO: 35386 - protein, 59 aa, Homo sapiens
  REGION 1..59: note = ENSP00000416747
MRMCTPIRGLLMALAVMFGTAMAFAPIPRITWEHREVHLVQFHEPDIYNYSALLLSEDK

SEQ ID NO: 35387 - skipped

SEQ ID NO: 35388 - protein, 862 aa, Homo sapiens; identical to SEQ ID NO: 35380
  REGION 1..862: note = ENSP00000348822

SEQ ID NO: 35389 - protein, 738 aa, Homo sapiens
  REGION 1..738: note = ENSP00000391733
MRMCTPIRGLLMALAVMFGTAMAFAPIPRITWEHREVHLVQFHEPDIYNYSALLLSEDKDTLYIGAREAVFAVNALNISEKQHEVYWKVSEDKKAKCAEKGKSKQTECLNYIRVLQPLSATSLYVCGTNAFQPACDHLNLTSFKFLGKNEDGKGRCPFDPAHSYTSVMVDGELYSGTSYNFLGSEPIISRNSSHSPLRTEYAIPWLNEPSFVFADVIRKSPDSPDGEDDRVYFFFTEVSVEYEFVFRVLIPRIARVCKGDQGGLRTLQKKWTSFLKARLICSRPDSGLVFNVLRDVFVLRSPGLKVPVFYALFTPQLNNVGLSAVCAYNLSTAEEVFSHGKYMQSTTVEQSHTKWVRYNGPVPKPRPGACIDSEARAANYTSSLNLPDKTLQFVKDHPLMDDSVTPIDNRPRLIKKDVNYTQIVVDRTQALDGTVYDVMFVSTDRGALHKAISLEHAVHIIEETQLFQDFEPVQTLLLSSKKGNRFVYAGSNSGVVQAPLAFCGKHGTCEDCVLARDPYCAWSPPTATCVALHQTESPSRGLIQEMSGDASVCPASSPKPLPPPGSSSLSCLGHVGDRRLSSPWTPWPASGAGPDSSSRVSLLPPFLSDQAQHVHALGNFYLFCQATGPADIRFVWEKNGRALETCVPVQTHALPDGRAHALSWLQDAIRESAEYRCSVLSSAGNKTSKVQVAVMRPEVTHQERWTRELSAWRAVAGEHDRMMQSWRKAWESCSKDTL

SEQ ID NO: 35390 - protein, 738 aa, Homo sapiens; identical to SEQ ID NO: 35389
  REGION 1..738: note = ENSP00000344923

SEQ ID NO: 35391 - protein, 123 aa, Homo sapiens
  REGION 1..123: note = ENSP00000399948
MWTQRWKRSVSPGPADIRFVWEKNGRALETCVPVQTHALPDGRAHALSWLQDAIRESAEYRCSVLSSAGNKTSKVQVAVMRPEVTHQERWTRELSAWRAVAGEHDRMMQSWRKAWESCSKDTL

SEQ ID NO: 35392 - protein, 738 aa, Homo sapiens; identical to SEQ ID NO: 35389
  REGION 1..738: note = ENSP00000411981

SEQ ID NO: 35393 - protein, 548 aa, Homo sapiens; identical to SEQ ID NO: 35379
  REGION 1..548: note = ENSP00000395222

SEQ ID NO: 35394 - protein, 522 aa, Homo sapiens
  REGION 1..522: note = ENSP00000428896
MWGRLWPLLLSILTATAVPGPSLRRPSRELDATPRMTIPYEELSGTRHFKGQAQNYSTLLLEEASARLLVGARGALFSLSANDIGDGAHKEIHWEASPEMQSKCHQKGKNNQTECFNHVRFLQRLNSTHLYACGTHAFQPLCAAIDAEAFTLPTSFEEGKEKCPYDPARGFTGLIIDGGLYTATRYEFRSIPDIRRSRHPHSLRTEETPMHWLNDAEFVFSVLVRESKASAVGDDDKVYYFFTERATEEGSGSFTQSRSSHRVARVARVCKGDLGGKKILQKKWTSFLKARLICHIPLYETLRGVCSLDAETSSRTHFYAAFTLSTQWKTLEASAICRYDLAEIQAVFAGPYMEYQDGSRRWGRYEGGVPEPRPGSCITDSLRSQGYNSSQDLPSLVLDFVKLHPLMARPVVPTRGRPLLLKRNIRYTHLTGTPVTTPAGPTYDLLFLGTADGWIHKAVVLGSGMHIIEETQVFRESQSVENLVISLLQHSLYVGAPSGVIQLPLSSCSRYRSCYDCILARD

SEQ ID NO: 35395 - protein, 838 aa, Homo sapiens
  REGION 1..838: note = ENSP00000430881
MWGRLWPLLLSILTATAVPGPSLRRPSRELDATPRMTIPYEELSGTRHFKGQAQNYSTLLLEEASARLLVGARGALFSLSANDIGDGAHKEIHWEASPEMQSKCHQKGKNNQTECFNHVRFLQRLNSTHLYACGTHAFQPLCAAIDAEAFTLPTSFEEGKEKCPYDPARGFTGLIIDGGLYTATRYEFRSIPDIRRSRHPHSLRTEETPMHWLNDAEFVFSVLVRESKASAVGDDDKVYYFFTERATEEGSGSFTQSRSSHRVARVARVCKGDLGGKKILQKKWTSFLKARLICHIPLYETLRGVCSLDAETSSRTHFYAAFTLSTQWKTLEASAICRYDLAEIQAVFAGPYMEYQDGSRRWGRYEGGVPEPRPGSCITDSLRSQGYNSSQDLPSLVLDFVKLHPLMARPVVPTRGRPLLLKRNIRYTHLTGTPVTTPAGPTYDLLFLGTADGWIHKAVVLGSGMHIIEETQVFRESQSVENLVISLLQHSLYVGAPSGVIQLPLSSCSRYRSCYDCILARDPYCGWDPGTHACAAATTIANRTALIQDIERGNRGCESSRDTGPPPPLKTRSVLRGDDVLLPCDQPSNLARALWLLNGSMGLSDGQGGYRVGVDGLLVTDAQPEHSGNYGCYAEENGLRTLLASYSLTVRPATPAPAPKAPATPGAQLAPDVRLLYVLAIAALGGLCLILASSLLYVACLREGRRGRRRKYSLGRASRAGGSAVQLQTVSGQCPGEEDEGDDEGAGGLEGSCLQIIPGEGAPAPPPPPPPPPPAELTNGLVALPSRLRRMNGNSYVLLRQSNNGVPAGPCSFAEELSRILEKRKHTQLVEQLDESSV

SEQ ID NO: 35396 - protein, 170 aa, Homo sapiens
  REGION 1..170: note = ENSP00000430103
MWGRLWPLLLSILTATAVPGPSLRRPSRELDATPRMTIPYEELSGTRHFKGQAQNYSTLLLEEASARLLVGARGALFSLSANDIGDGAHKEIHWEASPEMQSKCHQKGKNNQTECFNHVRFLQRLNSTHLYACGTHAFQPLCAAIDAEAFTLPTSFEEGKEKCPYDPARG

SEQ ID NO: 35397 - protein, 838 aa, Homo sapiens; identical to SEQ ID NO: 35395
  REGION 1..838: note = ENSP00000359270

SEQ ID NO: 35398 - protein, 702 aa, Homo sapiens
  REGION 1..702: note = ENSP00000430175
MWGRLWPLLLSILTATAVPGPSLRRPSRELDATPRMTIPYEELSGTRHFKGQAQNYSTLLLEEASARLLVGARGALFSLSANDIGDGAHKEIHWEASPEMQSKCHQKGKNNQTECFNHVRFLQRLNSTHLYACGTHAFQPLCAAIDAEAFTLPTSFEEGKEKCPYDPARGFTGLIIDGGLYTATRYEFRSIPDIRRSRHPHSLRTEETPMHWLNDAEFVFSVLVRESKASAVGDDDKVYYFFTERATEEGSGSFTQSRSSHRVARVARVCKGDLGGKKILQKKWTSFLKARLICHIPLYETLRGVCSLDAETSSRTHFYAAFTLSTQWKTLEASAICRYDLAEIQAVFAGPYMEYQDGSRRWGRYEGGVPEPRPGSCITDSLRSQGYNSSQDLPSLVLDFVKLHPLMARPVVPTRGRPLLLKRNIRYTHLTGTPVTTPAGPTYDLLFLGTADGWIHKAVVLGSGMHIIEETQVFRESQSVENLVISLLQHSLYVGAPSGVIQLPLSSCSRYRSCYDCILARDPYCGWDPGTHACAAATTIANRSQGSRTALIQDIERGNRGCESSRDTGRALQVHMGSMSPPSAWPCVLDGPETRQDLCQPPKPCVHSHAHMEECLSAGLQCPHPHLLLVHSCFIPASGLGVPSQLPHPIWSSSPAPCGDLFVKSLGTGQPGEVRLHHSPPLPSCVALVNQPPHSPWSFSRV

SEQ ID NO: 35399 - protein, 843 aa, Homo sapiens
  REGION 1..843: note = ENSP00000210633
MWGRLWPLLLSILTATAVPGPSLRRPSRELDATPRMTIPYEELSGTRHFKGQAQNYSTLLLEEASARLLVGARGALFSLSANDIGDGAHKEIHWEASPEMQSKCHQKGKNNQTECFNHVRFLQRLNSTHLYACGTHAFQPLCAAIDAEAFTLPTSFEEGKEKCPYDPARGFTGLIIDGGLYTATRYEFRSIPDIRRSRHPHSLRTEETPMHWLNDAEFVFSVLVRESKASAVGDDDKVYYFFTERATEEGSGSFTQSRSSHRVARVARVCKGDLGGKKILQKKWTSFLKARLICHIPLYETLRGVCSLDAETSSRTHFYAAFTLSTQWKTLEASAICRYDLAEIQAVFAGPYMEYQDGSRRWGRYEGGVPEPRPGSCITDSLRSQGYNSSQDLPSLVLDFVKLHPLMARPVVPTRGRPLLLKRNIRYTHLTGTPVTTPAGPTYDLLFLGTADGWIHKAVVLGSGMHIIEETQVFRESQSVENLVISLLQHSLYVGAPSGVIQLPLSSCSRYRSCYDCILARDPYCGWDPGTHACAAATTIANRSQGSRTALIQDIERGNRGCESSRDTGPPPPLKTRSVLRGDDVLLPCDQPSNLARALWLLNGSMGLSDGQGGYRVGVDGLLVTDAQPEHSGNYGCYAEENGLRTLLASYSLTVRPATPAPAPKAPATPGAQLAPDVRLLYVLAIAALGGLCLILASSLLYVACLREGRRGRRRKYSLGRASRAGGSAVQLQTVSGQCPGEEDEGDDEGAGGLEGSCLQIIPGEGAPAPPPPPPPPPPAELTNGLVALPSRLRRMNGNSYVLLRQSNNGVPAGPCSFAEELSRILEKRKHTQLVEQLDESSV

SEQ ID NO: 35400 - protein, 131 aa, Homo sapiens
  REGION 1..131: note = ENSP00000429888
  VARIANT 1: note = Any amino acid
XREGRRGRRRKYSLGRASRAGGSAVQLQTVSGRALQVHMGSMSPPSAWPCVLDGPETRQDLCQPPKPCVHSHAHMEECLSAGLQCPHPHLLLVHSCFIPASGLGVPSQLPHPIWSSSPAPCGDLFVKSLGT

SEQ ID NO: 35401 - protein, 127 aa, Homo sapiens
  REGION 1..127: note = ENSP00000479499
MGSMSPPSAWPCVLDGPETRQDLCQPPKPCVHSHAHMEECLSAGLQCPHPHLLLVHSCFIPASGLGVPSQLPHPIWSSSPAPCGDLFVKSLGTGQPGEVRLHHSPPLPSCVALVNQPPHSPWSFSRV

SEQ ID NO: 35402 - protein, 1074 aa, Homo sapiens
  REGION 1..1074: note = ENSP00000371936
MKGTCVIAWLFSSLGLWRLAHPEAQGTTQCQRTEHPVISYKEIGPWLREFRAKNAVDFSQLTFDPGQKELVVGARNYLFRLQLEDLSLIQAVEWECDEATKKACYSKGKSKEECQNYIRVLLVGGDRLFTCGTNAFTPVCTNRSLSNLTEIHDQISGMARCPYSPQHNSTALLTAGGELYAATAMDFPGRDPAIYRSLGILPPLRTAQYNSKWLNEPNFVSSYDIGNFTYFFFRENAVEHDCGKTVFSRAARVCKNDIGGRFLLEDTWTTFMKARLNCSRPGEVPFYYNELQSTFFLPELDLIYGIFTTNVNSIAASAVCVFNLSAIAQAFSGPFKYQENSRSAWLPYPNPNPHFQCGTVDQGLYVNLTERNLQDAQKFILMHEVVQPVTTVPSFMEDNSRFSHVAVDVVQGREALVHIIYLATDYGTIKKVRVPLNQTSSSCLLEEIELFPERRREPIRSLQILHSQSVLFVGLREHVVKIPLKRCQFYRTRSTCIGAQDPYCGWDVVMKKCTSLEESLSMTQWEQSISACPTRNLTVDGHFGVWSPWTPCTHTDGSAVGSCLCRTRSCDSPAPQCGGWQCEGPGMEIANCSRNGGWTPWTSWSPCSTTCGIGFQVRQRSCSNPTPRHGGRVCVGQNREERYCNEHLLCPPHMFWTGWGPWERCTAQCGGGIQARRRICENGPDCAGCNVEYQSCNTNPCPELKKTTPWTPWTPVNISDNGGHYEQRFRYTCKARLADPNLLEVGRQRIEMRYCSSDGTSGCSTDGLSGDFLRAGRYSAHTVNGAWSAWTSWSQCSRDCSRGIRNRKRVCNNPEPKYGGMPCLGPSLEYQECNILPCPVDGVWSCWSPWTKCSATCGGGHYMRTRSCSNPAPAYGGDICLGLHTEEALCNTQPCPESWSEWSDWSECEASGVQVRARQCILLFPMGSQCSGNTTESRPCVFDSNFIPEVSVARSSSVEEKRCGEFNMFHMIAVGLSSSILGCLLTLLVYTYCQRYQQQSHDATVIHPVSPAPLNTSITNHINKLDKYDSVEAIKAFNKNNLILEERNKYFNPHLTGKTYSNAYFTDLNNYDEY

SEQ ID NO: 35403 - protein, 254 aa, Homo sapiens
  REGION 1..254: note = ENSP00000421961
MKGTCVIAWLFSSLGLWRLAHPEAQGTTQCQRTEHPVISYKEIGPWLREFRAKNAVDFSQLTFDPGQKELVVGARNYLFRLQLEDLSLIQAVEWECDEATKKACYSKGKSKEECQNYIRVLLVGGDRLFTCGTNAFTPVCTNRSLSNLTEIHDQISGMARCPYSPQHNSTALLTAGGELYAATAMDFPGRDPAIYRSLGILPPLRTAQYNSKWLNEPNFVSSYDIGNFTYFFFRENAVEHDCGKTVFSRAARVC

SEQ ID NO: 35404 - protein, 197 aa, Homo sapiens
  REGION 1..197: note = ENSP00000400828
  VARIANT 1: note = Any amino acid
XRSCTSPAPSPEGWSPWSEWSKCTDDGAQSRSRHCEELLPGSSACAGNSSQSRPCPYSEIPVILPASSMEEATDCAGFNLIHLVATGISCFLGSGLLTLAVYLSCQHCQRQSQESTLVHPATPNHLHYKGGGTPKNEKYTPMEFKTLNKNNLIPDDRANFYPLQQTNVYTTTYYPSPLNKHSFRPEASPGQRCFPNS

SEQ ID NO: 35405 - protein, 1151 aa, Homo sapiens
  REGION 1..1151: note = ENSP00000350215
MPCGFSPSPVAHHLVPGPPDTPAQQLRCGWTVGGWLLSLVRGLLPCLPPGARTAEGPIMVLAGPLAVSLLLPSLTLLVSHLSSSQDVSSEPSSEQQLCALSKHPTVAFEDLQPWVSNFTYPGARDFSQLALDPSGNQLIVGARNYLFRLSLANVSLLQATEWASSEDTRRSCQSKGKTEEECQNYVRVLIVAGRKVFMCGTNAFSPMCTSRQVGNLSRTIEKINGVARCPYDPRHNSTAVISSQGELYAATVIDFSGRDPAIYRSLGSGPPLRTAQYNSKWLNEPNFVAAYDIGLFAYFFLRENAVEHDCGRTVYSRVARVCKNDVGGRFLLEDTWTTFMKARLNCSRPGEVPFYYNELQSAFHLPEQDLIYGVFTTNVNSIAASAVCAFNLSAISQAFNGPFRYQENPRAAWLPIANPIPNFQCGTLPETGPNENLTERSLQDAQRLFLMSEAVQPVTPEPCVTQDSVRFSHLVVDLVQAKDTLYHVLYIGTESGTILKALSTASRSLHGCYLEELHVLPPGRREPLRSLRILHSARALFVGLRDGVLRVPLERCAAYRSQGACLGARDPYCGWDGKQQRCSTLEDSSNMSLWTQNITACPVRNVTRDGGFGPWSPWQPCEHLDGDNSGSCLCRARSCDSPRPRCGGLDCLGPAIHIANCSRNGAWTPWSSWALCSTSCGIGFQVRQRSCSNPAPRHGGRICVGKSREERFCNENTPCPVPIFWASWGSWSKCSSNCGGGMQSRRRACENGNSCLGCGVEFKTCNPEGCPEVRRNTPWTPWLPVNVTQGGARQEQRFRFTCRAPLADPHGLQFGRRRTETRTCPADGSGSCDTDALVEVLLRSGSTSPHTVSGGWAAWGPWSSCSRDCELGFRVRKRTCTNPEPRNGGLPCVGDAAEYQDCNPQACPVRGAWSCWTSWSPCSASCGGGHYQRTRSCTSPAPSPGEDICLGLHTEEALCATQACPEGWSPWSEWSKCTDDGAQSRSRHCEELLPGSSACAGNSSQSRPCPYSEIPVILPASSMEEATDCAGFNLIHLVATGISCFLGSGLLTLAVYLSCQHCQRQSQESTLVHPATPNHLHYKGGGTPKNEKYTPMEFKTLNKNNLIPDDRANFYPLQQTNVYTTTYYPSPLNKHSFRPEASPGQRCFPNS

SEQ ID NO: 35406 - protein, 1094 aa, Homo sapiens
  REGION 1..1094: note = ENSP00000417570
MPCGFSPSPVAHHLVPGPPDTPAQQLRCGWTVGGWLLSLVRGLLPCLPPGARTAEGPIMVLAGPLAVSLLLPSLTLLVSHLSSSQDVSSEPSSEQQLCALSKHPTVAFEDLQPWVSNFTYPGARDFSQLALDPSGNQLIVGARNYLFRLSLANVSLLQATEWASSEDTRRSCQSKGKTEEECQNYVRVLIVAGRKVFMCGTNAFSPMCTSRQVGNLSRTIEKINGVARCPYDPRHNSTAVISSQGELYAATVIDFSGRDPAIYRSLGSGPPLRTAQYNSKWLNEPNFVAAYDIGLFAYFFLRENAVEHDCGRTVYSRVARVCKNDVGGRFLLEDTWTTFMKARLNCSRPGEVPFYYNELQSAFHLPEQDLIYGVFTTNVNSIAASAVCAFNLSAISQAFNGPFRYQENPRAAWLPIANPIPNFQCGTLPETGPNENLTERSLQDAQRLFLMSEAVQPVTPEPCVTQDSVRFSHLVVDLVQAKDTLYHVLYIGTESGTILKALSTASRSLHGCYLEELHVLPPGRREPLRSLRILHSARALFVGLRDGVLRVPLERCAAYRSQGACLGARDPYCGWDGKQQRCSTLEDSSNMSLWTQNITACPVRNVTRDGGFGPWSPWQPCEHLDGDNSGSCLCRARSCDSPRPRCGGLDCLGPAIHIANCSRNGAWTPWSSWALCSTSCGIGFQVRQRSCSNPAPRHGGRICVGKSREERFCNENTPCPVPIFWASWGSWSKCSSNCGGGMQSRRRACENGNSCLGCGVEFKTCNPEGCPEVRRNTPWTPWLPVNVTQGGARQEQRFRFTCRAPLADPHGLQFGRRRTETRTCPADGSGSCDTDALVEVLLRSGSTSPHTVSGGWAAWGPWSSCSRDCELGFRVRKRTCTNPEPRNGGLPCVGDAAEYQDCNPQACPVRGAWSCWTSWSPCSASCGGGHYQRTRSCTSPAPSPGEDICLGLHTEEALCATQACPEGWSPWSEWSKCTDDGAQSRSRHCEELLPGSSACAGNSSQSRPCPYSEIPVILPASSMEEATDCAGKRNRTYLMLRSSQPSGTPLQSLDSFHILLQTAKLCWGPHCFEMGSISSTWWPRASPASWALGS

SEQ ID NO: 35407 - protein, 1088 aa, Homo sapiens
  REGION 1..1088: note = ENSP00000377208
MPCGFSPSPVAHHLVPGPPDTPAQQLRCGWTVGGWLLSLVRGLLPCLPPGARTAEGPIMVLAGPLAVSLLLPSLTLLVSHLSSSQDVSSEPSSEQQLCALSKHPTVAFEDLQPWVSNFTYPGARDFSQLALDPSGNQLIVGARNYLFRLSLANVSLLQATEWASSEDTRRSCQSKGKTEEECQNYVRVLIVAGRKVFMCGTNAFSPMCTSRQVGNLSRTIEKINGVARCPYDPRHNSTAVISSQGELYAATVIDFSGRDPAIYRSLGSGPPLRTAQYNSKWLNEPNFVAAYDIGLFAYFFLRENAVEHDCGRTVYSRVARVCKNDVGGRFLLEDTWTTFMKARLNCSRPGEVPFYYNELQSAFHLPEQDLIYGVFTTNVNSIAASAVCAFNLSAISQAFNGPFRYQENPRAAWLPIANPIPNFQCGTLPETGPNENLTERSLQDAQRLFLMSEAVQPVTPEPCVTQDSVRFSHLVVDLVQAKDTLYHVLYIGTESGTILKALSTASRSLHGCYLEELHVLPPGRREPLRSLRILHSARALFVGLRDGVLRVPLERCAAYRSQGACLGARDPYCGWDGKQQRCSTLEDSSNMSLWTQNITACPVRNVTRDGGFGPWSPWQPCEHLDGDNSGSCLCRARSCDSPRPRCGGLDCLGPAIHIANCSRNGAWTPWSSWALCSTSCGIGFQVRQRSCSNPAPRHGGRICVGKSREERFCNENTPCPVPIFWASWGSWSKCSSNCGGGMQSRRRACENGNSCLGCGVEFKTCNPEGCPEVRRNTPWTPWLPVNVTQGGARQEQRFRFTCRAPLADPHGLQFGRRRTETRTCPADGSGSCDTDALVEVLLRSGSTSPHTVSGGWAAWGPWSSCSRDCELGFRVRKRTCTNPEPRNGGLPCVGDAAEYQDCNPQACPVRGAWSCWTSWSPCSASCGGGHYQRTRSCTSPAPSPGEDICLGLHTEEALCATQACPEGWSPWSEWSKCTDDGAQSRSRHCEELLPGSSACAGNSSQSRPCPYSEIPVILPASSMEEATDCAGFNLIHLVATGISCFLGSGLLTLAVYLSCQHCQRQSQESTLVHPATPNHLHYKGGGTP

SEQ ID NO: 35408 - protein, 142 aa, Homo sapiens
  REGION 1..142: note = ENSP00000401056
MPCGFSPSPVAHHLVPGPPDTPAQQLRCGWTVGGWLLSLVRGLLPCLPPGARTAEGPIMVLAGPLAVSLLLPSLTLLVSHLSSSQDVSSEPSSEQQLCALSKHPTVAFEDLQPWVSNFTYPGARDFSQLALDPSGNQLIVGA

SEQ ID NO: 35409 - protein, 84 aa, Homo sapiens
  REGION 1..84: note = ENSP00000401038
MPCGFSPSPVAHHLVPGPPDTPAQQLRCGWTVGGWLLSLVRGLLPCLPPGARTAEGPIMVLAGPLAVSLLLPSLTLLVSHLSSS

SEQ ID NO: 35410 - protein, 1205 aa, Homo sapiens
  REGION 1..1205: note = ENSP00000389588
MLHLSAEEAIGCVRVRRSFIDELAFGRGHSTGTGKQKRRDRVSGSSWCLACVSWMPCGFSPSPVAHHLVPGPPDTPAQQLRCGWTVGGWLLSLVRGLLPCLPPGARTAEGPIMVLAGPLAVSLLLPSLTLLVSHLSSSQDVSSEPSSEQQLCALSKHPTVAFEDLQPWVSNFTYPGARDFSQLALDPSGNQLIVGARNYLFRLSLANVSLLQATEWASSEDTRRSCQSKGKTEEECQNYVRVLIVAGRKVFMCGTNAFSPMCTSRQVGNLSRTIEKINGVARCPYDPRHNSTAVISSQGELYAATVIDFSGRDPAIYRSLGSGPPLRTAQYNSKWLNEPNFVAAYDIGLFAYFFLRENAVEHDCGRTVYSRVARVCKNDVGGRFLLEDTWTTFMKARLNCSRPGEVPFYYNELQSAFHLPEQDLIYGVFTTNVNSIAASAVCAFNLSAISQAFNGPFRYQENPRAAWLPIANPIPNFQCGTLPETGPNENLTERSLQDAQRLFLMSEAVQPVTPEPCVTQDSVRFSHLVVDLVQAKDTLYHVLYIGTESGTILKALSTASRSLHGCYLEELHVLPPGRREPLRSLRILHSARALFVGLRDGVLRVPLERCAAYRSQGACLGARDPYCGWDGKQQRCSTLEDSSNMSLWTQNITACPVRNVTRDGGFGPWSPWQPCEHLDGDNSGSCLCRARSCDSPRPRCGGLDCLGPAIHIANCSRNGAWTPWSSWALCSTSCGIGFQVRQRSCSNPAPRHGGRICVGKSREERFCNENTPCPVPIFWASWGSWSKCSSNCGGGMQSRRRACENGNSCLGCGVEFKTCNPEGCPEVRRNTPWTPWLPVNVTQGGARQEQRFRFTCRAPLADPHGLQFGRRRTETRTCPADGSGSCDTDALVEVLLRSGSTSPHTVSGGWAAWGPWSSCSRDCELGFRVRKRTCTNPEPRNGGLPCVGDAAEYQDCNPQACPVRGAWSCWTSWSPCSASCGGGHYQRTRSCTSPAPSPGEDICLGLHTEEALCATQACPEGWSPWSEWSKCTDDGAQSRSRHCEELLPGSSACAGNSSQSRPCPYSEIPVILPASSMEEATDCAGFNLIHLVATGISCFLGSGLLTLAVYLSCQHCQRQSQESTLVHPATPNHLHYKGGGTPKNEKYTPMEFKTLNKNNLIPDDRANFYPLQQTNVYTTTYYPSPLNKHSFRPEASPGQRCFPNS

SEQ ID NO: 35411 - protein, 1151 aa, Homo sapiens; identical to SEQ ID NO: 35405
  REGION 1..1151: note = ENSP00000479602

SEQ ID NO: 35412 - protein, 1057 aa, Homo sapiens
  REGION 1..1057: note = ENSP00000195173
MVLAGPLAVSLLLPSLTLLVSHLSSSQDVSSEPSSEQQLCALSKHPTVAFEDLQPWVSNFTYPGARDFSQLALDPSGNQLIVGARNYLFRLSLANVSLLQATEWASSEDTRRSCQSKGKTEEECQNYVRVLIVAGRKVFMCGTNAFSPMCTSRQVGNLSRTIEKINGVARCPYDPRHNSTAVISSQGELYAATVIDFSGRDPAIYRSLGSGPPLRTAQYNSKWLNEPNFVAAYDIGLFAYFFLRENAVEHDCGRTVYSRVARVCKNDVGGRFLLEDTWTTFMKARLNCSRPGEVPFYYNELQSAFHLPEQDLIYGVFTTNVNSIAASAVCAFNLSAISQAFNGPFRYQENPRAAWLPIANPIPNFQCGTLPETGPNENLTERSLQDAQRLFLMSEAVQPVTPEPCVTQDSVRFSHLVVDLVQAKDTLYHVLYIGTESGTILKALSTASRSLHGCYLEELHVLPPGRREPLRSLRILHSARALFVGLRDGVLRVPLERCAAYRSQGACLGARDPYCGWDGKQQRCSTLEDSSNMSLWTQNITACPVRNVTRDGGFGPWSPWQPCEHLDGDNSGSCLCRARSCDSPRPRCGGLDCLGPAIHIANCSRNGAWTPWSSWALCSTSCGIGFQVRQRSCSNPAPRHGGRICVGKSREERFCNENTPCPVPIFWASWGSWSKCSSNCGGGMQSRRRACENGNSCLGCGVEFKTCNPEGCPEVRRNTPWTPWLPVNVTQGGARQEQRFRFTCRAPLADPHGLQFGRRRTETRTCPADGSGSCDTDALVEVLLRSGSTSPHTVSGGWAAWGPWSSCSRDCELGFRVRKRTCTNPEPRNGGLPCVGDAAEYQDCNPQACPGEDICLGLHTEEALCATQACPEGWSPWSEWSKCTDDGAQSRSRHCEELLPGSSACAGNSSQSRPCPYSEIPVILPASSMEEATDCAGFNLIHLVATGISCFLGSGLLTLAVYLSCQHCQRQSQESTLVHPATPNHLHYKGGGTPKNEKYTPMEFKTLNKNNLIPDDRANFYPLQQTNVYTTTYYPSPLNKHSFRPEASPGQRCFPNS

SEQ ID NO: 35413 - protein, 1030 aa, Homo sapiens
  REGION 1..1030: note = ENSP00000345512
MRSEALLLYFTLLHFAGAGFPEDSEPISISHGNYTKQYPVFVGHKPGRNTTQRHRLDIQMIMIMNGTLYIAARDHIYTVDIDTSHTEEIYCSKKLTWKSRQADVDTCRMKGKHKDECHNFIKVLLKKNDDALFVCGTNAFNPSCRNYKMDTLEPFGDEFSGMARCPYDAKHANVALFADGKLYSATVTDFLAIDAVIYRSLGESPTLRTVKHDSKWLKEPYFVQAVDYGDYIYFFFREIAVEYNTMGKVVFPRVAQVCKNDMGGSQRVLEKQWTSFLKARLNCSVPGDSHFYFNILQAVTDVIRINGRDVVLATFSTPYNSIPGSAVCAYDMLDIASVFTGRFKEQKSPDSTWTPVPDERVPKPRPGCCAGSSSLERYATSNEFPDDTLNFIKTHPLMDEAVPSIFNRPWFLRTMVRYRLTKIAVDTAAGPYQNHTVVFLGSEKGIILKFLARIGNSGFLNDSLFLEEMSVYNSEKCSYDGVEDKRIMGMQLDRASSSLYVAFSTCVIKVPLGRCERHGKCKKTCIASRDPYCGWIKEGGACSHLSPNSRLTFEQDIERGNTDGLGDCHNSFVALNGHSSSLLPSTTTSDSTAQEGYESRGGMLDWKHLLDSPDSTDPLGAVSSHNHQDKKGVIRESYLKGHDQLVPVTLLAIAVILAFVMGAVFSGITVYCVCDHRRKDVAVVQRKEKELTHSRRGSMSSVTKLSGLFGDTQSKDPKPEAILTPLMHNGKLATPGNTAKMLIKADQHHLDLTALPTPESTPTLQQKRKPSRGSREWERNQNLINACTKDMPPMGSPVIPTDLPLRASPSHIPSVVVLPITQQGYQHEYVDQPKMSEVAQMALEDQAATLEYKTIKEHLSSKSPNHGVNLVENLDSLPPKVPQREASLGPPGASLSQTGLSKRLEMHHSSSYGVDYKRSYPTNSLTRSHQATTLKRNNTNSSNSSHLSRNQSFGRGDNPPPAPQRVDSIQVHSSQPSGQAVTVSRQPSLNAYNSLTRSGLKRTPSLKPDVPPKPSFAPLSTSMKPNDACT

SEQ ID NO: 35414 - protein, 1047 aa, Homo sapiens
  REGION 1..1047: note = ENSP00000257414
MRSEALLLYFTLLHFAGAGFPEDSEPISISHGNYTKQYPVFVGHKPGRNTTQRHRLDIQMIMIMNGTLYIAARDHIYTVDIDTSHTEEIYCSKKLTWKSRQADVDTCRMKGKHKDECHNFIKVLLKKNDDALFVCGTNAFNPSCRNYKMDTLEPFGDEFSGMARCPYDAKHANVALFADGKLYSATVTDFLAIDAVIYRSLGESPTLRTVKHDSKWLKEPYFVQAVDYGDYIYFFFREIAVEYNTMGKVVFPRVAQVCKNDMGGSQRVLEKQWTSFLKARLNCSVPGDSHFYFNILQAVTDVIRINGRDVVLATFSTPYNSIPGSAVCAYDMLDIASVFTGRFKEQKSPDSTWTPVPDERVPKPRPGCCAGSSSLERYATSNEFPDDTLNFIKTHPLMDEAVPSIFNRPWFLRTMVRYRLTKIAVDTAAGPYQNHTVVFLGSEKGIILKFLARIGNSGFLNDSLFLEEMSVYNSEKCSYDGVEDKRIMGMQLDRASSSLYVAFSTCVIKVPLGRCERHGKCKKTCIASRDPYCGWIKEGGACSHLSPNSRLTFEQDIERGNTDGLGDCHNSFVALNDISTPLPDNEMSYNTVYGHSSSLLPSTTTSDSTAQEGYESRGGMLDWKHLLDSPDSTDPLGAVSSHNHQDKKGVIRESYLKGHDQLVPVTLLAIAVILAFVMGAVFSGITVYCVCDHRRKDVAVVQRKEKELTHSRRGSMSSVTKLSGLFGDTQSKDPKPEAILTPLMHNGKLATPGNTAKMLIKADQHHLDLTALPTPESTPTLQQKRKPSRGSREWERNQNLINACTKDMPPMGSPVIPTDLPLRASPSHIPSVVVLPITQQGYQHEYVDQPKMSEVAQMALEDQAATLEYKTIKEHLSSKSPNHGVNLVENLDSLPPKVPQREASLGPPGASLSQTGLSKRLEMHHSSSYGVDYKRSYPTNSLTRSHQATTLKRNNTNSSNSSHLSRNQSFGRGDNPPPAPQRVDSIQVHSSQPSGQAVTVSRQPSLNAYNSLTRSGLKRTPSLKPDVPPKPSFAPLSTSMKPNDACT

SEQ ID NO: 35415 - protein, 457 aa, Homo sapiens
  REGION 1..457: note = ENSP00000422997
MKTGHSSSLLPSTTTSDSTAQEGYESRGGMLDWKHLLDSPDSTDPLGAVSSHNHQDKKGVIRESYLKGHDQLVPVTLLAIAVILAFVMGAVFSGITVYCVCDHRRKDVAVVQRKEKELTHSRRGSMSSVTKLSGLFGDTQSKDPKPEAILTPLMHNGKLATPGNTAKMLIKADQHHLDLTALPTPESTPTLQQKRKPSRGSREWERNQNLINACTKDMPPMGSPVIPTDLPLRASPSHIPSVVVLPITQQGYQHEYVDQPKMSEVAQMALEDQAATLEYKTIKEHLSSKSPNHGVNLVENLDSLPPKVPQREASLGPPGASLSQTGLSKRLEMHHSSSYGVDYKRSYPTNSLTRSHQATTLKRNNTNSSNSSHLSRNQSFGRGDNPPPAPQRVDSIQVHSSQPSGQAVTVSRQPSLNAYNSLTRSGLKRTPSLKPDVPPKPSFAPLSTSMKPNDACT

SEQ ID NO: 35416 - protein, 545 aa, Homo sapiens
  REGION 1..545: note = ENSP00000422275
  VARIANT 1: note = Any amino acid
XYQNHTVVFLGSEKGIILKFLARIGNSGFLNDSLFLEEMSVYNSEKCSYDGVEDKRIMGMQLDRASSSLYVAFSTCVIKVPLGRCERHGKCKKTCIASRDPYCGWIKEGGACSHLSPNSRLTFEQDIERGNTDGLGDCHNSFVALNGVIRESYLKGHDQLVPVTLLAIAVILAFVMGAVFSGITVYCVCDHRRKDVAVVQRKEKELTHSRRGSMSSVTKLSGLFGDTQSKDPKPEAILTPLMHNGKLATPGNTAKMLIKADQHHLDLTALPTPESTPTLQQKRKPSRGSREWERNQNLINACTKDMPPMGSPVIPTDLPLRASPSHIPSVVVLPITQQGYQHEYVDQPKMSEVAQMALEDQAATLEYKTIKEHLSSKSPNHGVNLVENLDSLPPKVPQREASLGPPGASLSQTGLSKRLEMHHSSSYGVDYKRSYPTNSLTRSHQATTLKRNNTNSSNSSHLSRNQSFGRGDNPPPAPQRVDSIQVHSSQPSGQAVTVSRQPSLNAYNSLTRSGLKRTPSLKPDVPPKPSFAPLSTSMKPNDACT

SEQ ID NO: 35417 - protein, 409 aa, Homo sapiens
  REGION 1..409: note = ENSP00000425364
MKNASPETREGVIRESYLKGHDQLVPVTLLAIAVILAFVMGAVFSGITVYCVCDHRRKDVAVVQRKEKELTHSRRGSMSSVTKLSGLFGDTQSKDPKPEAILTPLMHNGKLATPGNTAKMLIKADQHHLDLTALPTPESTPTLQQKRKPSRGSREWERNQNLINACTKDMPPMGSPVIPTDLPLRASPSHIPSVVVLPITQQGYQHEYVDQPKMSEVAQMALEDQAATLEYKTIKEHLSSKSPNHGVNLVENLDSLPPKVPQREASLGPPGASLSQTGLSKRLEMHHSSSYGVDYKRSYPTNSLTRSHQATTLKRNNTNSSNSSHLSRNQSFGRGDNPPPAPQRVDSIQVHSSQPSGQAVTVSRQPSLNAYNSLTRSGLKRTPSLKPDVPPKPSFAPLSTSMKPNDACT

SEQ ID NO: 35418 - protein, 1030 aa, Homo sapiens; identical to SEQ ID NO: 35413
  REGION 1..1030: note = ENSP00000424388

SEQ ID NO: 35419 - protein, 159 aa, Homo sapiens
  REGION 1..159: note = ENSP00000421935
MRSEALLLYFTLLHFAGAGFPEDSEPISISHGNYTKQYPVFVGHKPGRNTTQRHRLDIQMIMIMNGTLYIAARDHIYTVDIDTSHTEEIYCSKKLTWKSRQADVDTCRMKGKHKDECHNFIKVLLKKNDDALFVCGTNAFNPSCRNYKMDTLEPFGDEF

SEQ ID NO: 35420 - protein, 114 aa, Homo sapiens
  REGION 1..114: note = ENSP00000425553
MRSEALLLYFTLLHFAGAGFPEDSEPISISHGNYTKQYPVFVGHKPGRNTTQRHRLDIQMIMIMNGTLYIAARDHIYTVDIDTSHTEEIYCSKKLTWKSRQADVDTCRMKGKHK

SEQ ID NO: 35421 - protein, 1011 aa, Homo sapiens
  REGION 1..1011: note = ENSP00000452815
MRVFLLCAYILLLMVSQLRAVSFPEDDEPLNTVDYHYSRQYPVFRGRPSGNESQHRLDFQLMLKIRDTLYIAGRDQVYTVNLNEMPKTEVIPNKKLTWRSRQQDRENCAMKGKHKDECHNFIKVFVPRNDEMVFVCGTNAFNPMCRYYRLSTLEYDGEEISGLARCPFDARQTNVALFADGKLYSATVADFLASDAVIYRSMGDGSALRTIKYDSKWIKEPHFLHAIEYGNYVYFFFREIAVEHNNLGKAVYSRVARICKNDMGGSQRVLEKHWTSFLKARLNCSVPGDSFFYFDVLQSITDIIQINGIPTVVGVFTTQLNSIPGSAVCAFSMDDIEKVFKGRFKEQKTPDSVWTAVPEDKVPKPRPGCCAKHGLAEAYKTSIDFPDETLSFIKSHPLMDSAVPPIADEPWFTKTRVRYRLTAISVDHSAGPYQNYTVIFVGSEAGMVLKVLAKTSPFSLNDSVLLEEIEAYNHAKCSAENEEDKKVISLQLDKDHHALYVAFSSCIIRIPLSRCERYGSCKKSCIASRDPYCGWLSQGSCGRVTPGMLLLTEDFFAFHNHSAEGYEQDTEFGNTAHLGDCHGVRWEVQSGESNQMVHMNVLITCVFAAFVLGAFIAGVAVYCYRDMFVRKNRKIHKDAESAQSCTDSSGSFAKLNGLFDSPVKEYQQNIDSPKLYSNLLTSRKELPPNGDTKSMVMDHRGQPPELAALPTPESTPVLHQKTLQAMKSHSEKAHGHGASRKETPQFFPSSPPPHSPLSHGHIPSAIVLPNATHDYNTSFSNSNAHKAEKKLQNIDHPLTKSSSKRDHRRSVDSRNTLNDLLKHLNDPNSNPKAIMGDIQMAHQNLMLDPMGSMSEVPPKVPNREASLYSPPSTLPRNSPTKRVDVPTTPGVPMTSLERQRGYHKNSSQRHSISAMPKNLNSPNGVLLSRQPSMNRGGYMPTPTGAKVDYIQGTPVSVHLQPSLSRQSSYTSNGTLPRTGLKRTPSLKPDVPPKPSFVPQTPSVRPLNKYTY

SEQ ID NO: 35422 - protein, 22 aa, Homo sapiens
  REGION 1..22: note = ENSP00000453097
MRVFLLCAYILLLMVSQLRAVS

SEQ ID NO: 35423 - skipped

SEQ ID NO: 35424 - protein, 148 aa, Homo sapiens
  REGION 1..148: note = ENSP00000453530
MRVFLLCAYILLLMVSQLRAVSFPEDDEPLNTVDYHYSRQYPVFRGRPSGNESQHRLDFQLMLKIRDTLYIAGRDQVYTVNLNEMPKTEVIPNKKLTWRSRQQDRENCAMKGKHKDECHNFIKVFVPRNDEMVFVCGTNAFNPMCRYY

SEQ ID NO: 35425 - protein, 1073 aa, Homo sapiens
  REGION 1..1073: note = ENSP00000446152
MRVFLLCAYILLLMVSQLRAVSFPEDDEPLNTVDYHYSRQYPVFRGRPSGNESQHRLDFQLMLKIRDTLYIAGRDQVYTVNLNEMPKTEVIPNKKLTWRSRQQDRENCAMKGKHKDECHNFIKVFVPRNDEMVFVCGTNAFNPMCRYYRLSTLEYDGEEISGLARCPFDARQTNVALFADGKLYSATVADFLASDAVIYRSMGDGSALRTIKYDSKWIKEPHFLHAIEYGNYVYFFFREIAVEHNNLGKAVYSRVARICKNDMGGSQRVLEKHWTSFLKARLNCSVPGDSFFYFDVLQSITDIIQINGIPTVVGVFTTQLNSIPGSAVCAFSMDDIEKVFKGRFKEQKTPDSVWTAVPEDKVPKPRPGCCAKHGLAEAYKTSIDFPDETLSFIKSHPLMDSAVPPIADEPWFTKTRVRYRLTAISVDHSAGPYQNYTVIFVGSEAGMVLKVLAKTSPFSLNDSVLLEEIEAYNHAKCSAENEEDKKVISLQLDKDHHALYVAFSSCIIRIPLSRCERYGSCKKSCIASRDPYCGWLSQGSCGRVTPGMLAEGYEQDTEFGNTAHLGDCHEILPTSTTPDYKIFGGPTSDMEVSSSSVTTMASIPEITPKVIDTWRPKLTSSRKFVVQDDPNTSDFTDPLSGIPKGVRWEVQSGESNQMVHMNVLITCVFAAFVLGAFIAGVAVYCYRDMFVRKNRKIHKDAESAQSCTDSSGSFAKLNGLFDSPVKEYQQNIDSPKLYSNLLTSRKELPPNGDTKSMVMDHRGQPPELAALPTPESTPVLHQKTLQAMKSHSEKAHGHGASRKETPQFFPSSPPPHSPLSHGHIPSAIVLPNATHDYNTSFSNSNAHKAEKKLQNIDHPLTKSSSKRDHRRSVDSRNTLNDLLKHLNDPNSNPKAIMGDIQMAHQNLMLDPMGSMSEVPPKVPNREASLYSPPSTLPRNSPTKRVDVPTTPGVPMTSLERQRGYHKNSSQRHSISAMPKNLNSPNGVLLSRQPSMNRGGYMPTPTGAKVDYIQGTPVSVHLQPSLSRQSSYTSNGTLPRTGLKRTPSLKPDVPPKPSFVPQTPSVRPLNKYTY

SEQ ID NO: 35426 - protein, 597 aa, Homo sapiens
  REGION 1..597: note = ENSP00000453661
MRVFLLCAYILLLMVSQLRAVSFPEDDEPLNTVDYHYSRQYPVFRGRPSGNESQHRLDFQLMLKIRDTLYIAGRDQVYTVNLNEMPKTEVIPNKKLTWRSRQQDRENCAMKGKHKDECHNFIKVFVPRNDEMVFVCGTNAFNPMCRYYRLSTLEYDGEEISGLARCPFDARQTNVALFADGKLYSATVADFLASDAVIYRSMGDGSALRTIKYDSKWIKEPHFLHAIEYGNYVYFFFREIAVEHNNLGKAVYSRVARICKNDMGGSQRVLEKHWTSFLKARLNCSVPGDSFFYFDVLQSITDIIQINGIPTVVGVFTTQLNSIPGSAVCAFSMDDIEKVFKGRFKEQKTPDSVWTAVPEDKVPKPRPGCCAKHGLAEAYKTSIDFPDETLSFIKSHPLMDSAVPPIADEPWFTKTRVRYRLTAISVDHSAGPYQNYTVIFVGSEAGMVLKVLAKTSPFSLNDSVLLEEIEAYNHAKCSAENEEDKKVISLQLDKDHHALYVAFSSCIIRIPLSRCERYGSCKKSCIASRDPYCGWLSQGSCGRVTPGMLAEGYEQDTEFGNTAHLGDCHDMEVSSSSVTTMVYDGKSSLESPTRWST

SEQ ID NO: 35427 - protein, 476 aa, Homo sapiens
  REGION 1..476: note = ENSP00000374076
MRVFLLCAYILLLMVSQLRAVSFPEDDEPLNTVDYHYSRQYPVFRGRPSGNESQHRLDFQLMLKIRDTLYIAGRDQVYTVNLNEMPKTEVIPNKKLTWRSRQQDRENCAMKGKHKDECHNFIKVFVPRNDEMVFVCGTNAFNPMCRYYRLSTLEYDGEEISGLARCPFDARQTNVALFADGKLYSATVADFLASDAVIYRSMGDGSALRTIKYDSKWIKEPHFLHAIEYGNYVYFFFREIAVEHNNLGKAVYSRVARICKNDMGGSQRVLEKHWTSFLKARLNCSVPGDSFFYFDVLQSITDIIQINGIPTVVGVFTTQLNSIPGSAVCAFSMDDIEKVFKGRFKEQKTPDSVWTAVPEDKVPKPRPGCCAKHGLAEAYKTSIDFPDETLSFIKSHPLMDSAVPPIADEPWFTKTRVRYRLTAISVDHSAGPYQNYTVIFVGSEAGMVLKVLAKTSPFSLNDSVLLEEIEAYNHAK

SEQ ID NO: 35428 - protein, 1073 aa, Homo sapiens; identical to SEQ ID NO: 35425
  REGION 1..1073: note = ENSP00000324857

SEQ ID NO: 35429 - protein, 1017 aa, Homo sapiens
  REGION 1..1017: note = ENSP00000346786
MRVFLLCAYILLLMVSQLRAVSFPEDDEPLNTVDYHYSRQYPVFRGRPSGNESQHRLDFQLMLKIRDTLYIAGRDQVYTVNLNEMPKTEVIPNKKLTWRSRQQDRENCAMKGKHKDECHNFIKVFVPRNDEMVFVCGTNAFNPMCRYYRLSTLEYDGEEISGLARCPFDARQTNVALFADGKLYSATVADFLASDAVIYRSMGDGSALRTIKYDSKWIKEPHFLHAIEYGNYVYFFFREIAVEHNNLGKAVYSRVARICKNDMGGSQRVLEKHWTSFLKARLNCSVPGDSFFYFDVLQSITDIIQINGIPTVVGVFTTQLNSIPGSAVCAFSMDDIEKVFKGRFKEQKTPDSVWTAVPEDKVPKPRPGCCAKHGLAEAYKTSIDFPDETLSFIKSHPLMDSAVPPIADEPWFTKTRVRYRLTAISVDHSAGPYQNYTVIFVGSEAGMVLKVLAKTSPFSLNDSVLLEEIEAYNHAKCSAENEEDKKVISLQLDKDHHALYVAFSSCIIRIPLSRCERYGSCKKSCIASRDPYCGWLSQGSCGRVTPGMLAEGYEQDTEFGNTAHLGDCHEILPTSTTPDYKIFGGPTSGVRWEVQSGESNQMVHMNVLITCVFAAFVLGAFIAGVAVYCYRDMFVRKNRKIHKDAESAQSCTDSSGSFAKLNGLFDSPVKEYQQNIDSPKLYSNLLTSRKELPPNGDTKSMVMDHRGQPPELAALPTPESTPVLHQKTLQAMKSHSEKAHGHGASRKETPQFFPSSPPPHSPLSHGHIPSAIVLPNATHDYNTSFSNSNAHKAEKKLQNIDHPLTKSSSKRDHRRSVDSRNTLNDLLKHLNDPNSNPKAIMGDIQMAHQNLMLDPMGSMSEVPPKVPNREASLYSPPSTLPRNSPTKRVDVPTTPGVPMTSLERQRGYHKNSSQRHSISAMPKNLNSPNGVLLSRQPSMNRGGYMPTPTGAKVDYIQGTPVSVHLQPSLSRQSSYTSNGTLPRTGLKRTPSLKPDVPPKPSFVPQTPSVRPLNKYTY

SEQ ID NO: 35430 - protein, 1011 aa, Homo sapiens; identical to SEQ ID NO: 35421
  REGION 1..1011: note = ENSP00000350770

SEQ ID NO: 35431 - protein, 998 aa, Homo sapiens
  REGION 1..998: note = ENSP00000374079
MRVFLLCAYILLLMVSQLRAVSFPEDDEPLNTVDYHYSRQYPVFRGRPSGNESQHRLDFQLMLKIRDTLYIAGRDQVYTVNLNEMPKTEVIPNKKLTWRSRQQDRENCAMKGKHKDECHNFIKVFVPRNDEMVFVCGTNAFNPMCRYYRLSTLEYDGEEISGLARCPFDARQTNVALFADGKLYSATVADFLASDAVIYRSMGDGSALRTIKYDSKWIKEPHFLHAIEYGNYVYFFFREIAVEHNNLGKAVYSRVARICKNDMGGSQRVLEKHWTSFLKARLNCSVPGDSFFYFDVLQSITDIIQINGIPTVVGVFTTQLNSIPGSAVCAFSMDDIEKVFKGRFKEQKTPDSVWTAVPEDKVPKPRPGCCAKHGLAEAYKTSIDFPDETLSFIKSHPLMDSAVPPIADEPWFTKTRVRYRLTAISVDHSAGPYQNYTVIFVGSEAGMVLKVLAKTSPFSLNDSVLLEEIEAYNHAKCSAENEEDKKVISLQLDKDHHALYVAFSSCIIRIPLSRCERYGSCKKSCIASRDPYCGWLSQGSCGRVTPGMLAEGYEQDTEFGNTAHLGDCHGVRWEVQSGESNQMVHMNVLITCVFAAFVLGAFIAGVAVYCYRDMFVRKNRKIHKDAESAQSCTDSSGSFAKLNGLFDSPVKEYQQNIDSPKLYSNLLTSRKELPPNGDTKSMVMDHRGQPPELAALPTPESTPVLHQKTLQAMKSHSEKAHGHGASRKETPQFFPSSPPPHSPLSHGHIPSAIVLPNATHDYNTSFSNSNAHKAEKKLQNIDHPLTKSSSKRDHRRSVDSRNTLNDLLKHLNDPNSNPKAIMGDIQMAHQNLMLDPMGSMSEVPPKVPNREASLYSPPSTLPRNSPTKRVDVPTTPGVPMTSLERQRGYHKNSSQRHSISAMPKNLNSPNGVLLSRQPSMNRGGYMPTPTGAKVDYIQGTPVSVHLQPSLSRQSSYTSNGTLPRTGLKRTPSLKPDVPPKPSFVPQTPSVRPLNKYTY

SEQ ID NO: 35432 - protein, 219 aa, Homo sapiens
  REGION 1..219: note = ENSP00000453755
MRVFLLCAYILLLMVSQLRAVSFPEDDEPLNTVDYHYSRQYPVFRGRPSGNESQHRLDFQLMLKIRDTLYIAGRDQVYTVNLNEMPKTEVIPNKKLTWRSRQQDRENCAMKGKHKDECHNFIKVFVPRNDEMVFVCGTNAFNPMCRYYRLSTLEYDGEEISGLARCPFDARQTNVALFADGKLYSATVADFLASDAVIYRSMGDGSALRTIKYDSKWIK

SEQ ID NO: 35433 - protein, 54 aa, Homo sapiens
  REGION 1..54: note = ENSP00000453518
  VARIANT 1: note = Any amino acid
XLLTEDFFAFHNHSAEGYEQDTEFGNTAHLGDCHEILPTSTTPDYKIFGGPTSG

SEQ ID NO: 35434 - protein, 198 aa, Homo sapiens
  REGION 1..198: note = ENSP00000453689
  VARIANT 1: note = Any amino acid
XLTEDFFAFHNHSAEGYEQDTEFGNTAHLGDCHEILPTSTTPDYKIFGGPTSDMEVSSSSVTTMASIPEITPKVIDTWRPKLTSSRKFVVQDDPNTSDFTDPLSGIPKGVRWEVQSGESNQMVHMNVLITCVFAAFVLGAFIAGVAVYCYRDMFVRKNRKIHKDAESAQSCTDSSGSFAKLNGLFDSPVKEYQQNIDS

SEQ ID NO: 35435 - protein, 597 aa, Homo sapiens; identical to SEQ ID NO: 35426
  REGION 1..597: note = ENSP00000348276

SEQ ID NO: 35436 - protein, 501 aa, Homo sapiens
  REGION 1..501: note = ENSP00000371535
MNRESFAAGERLVSPAYVRQGCEARRSHEHLIRLLLEKGKCPENGWDESTLELFLHELAIMDSNNFLGNCGVGEREGRVASALVARRHYRFIHGIGRSGDISAVQPKAAGSSLLNKITNSLVLDIIKLAGVHTVANCFVVPMATGMSLTLCFLTLRHKRPKAKYIIWPRIDQKSCFKSMITAGFEPVVIENVLEGDELRTDLKAVEAKVQELGPDCILCIHSTTSCFAPRVPDRLEELAVICANYDIPHIVNNAYGVQSSKCMHLIQQGARVGRIDAFVQSLDKNFMVPVGGAIIAGFNDSFIQEISKMYPGRASASPSLDVLITLLSLGSNGYKKLLKERKEMFSYLSNQIKKLSEAYNERLLHTPHNPISLAMTLKTLDEHRDKAVTQLGSMLFTRQVSGARVVPLGSMQTVSGYTFRGFMSHTNNYPCAYLNAASAIGMKMQDVDLFIKRLDRCLKAVRKERSKESDDNYDKTEDVDIEEMALKLDNVLLDTYQDASS

SEQ ID NO: 35437 - protein, 112 aa, Homo sapiens
  REGION 1..112: note = ENSP00000351857
MNRESFAAGERLVSPAYVRQGCEARRSHEHLIRLLLEKSLALSPRLECSVTISAHCSLRLPGSRHSPASASRVAGTTGARHHTRASVQRMAGMKVHLNSFYMNLQSWTATIS

SEQ ID NO: 35438 - protein, 47 aa, Homo sapiens
  REGION 1..47: note = ENSP00000421880
MNRESFAAGERLVSPAYVRQGCEARRSHEHLIRLLLEKVHSWHWTIR

SEQ ID NO: 35439 - protein, 95 aa, Homo sapiens
  REGION 1..95: note = ENSP00000423850
  VARIANT 1: note = Any amino acid
XKYIIWPRIDQKSCFKSMITAGFEPVVIENVLEGDELRTDLKAVEAKVQELGPDCILCIHSTTSCFAPRVPDRKSFSFTFFRCPYYFIVTWIKWL

SEQ ID NO: 35440 - protein, 177 aa, Homo sapiens [sequence omitted]

SEQ ID NO: 35441 - protein, 331 aa, Homo sapiens
  REGION 1..331: note = ENSP00000463768
MVAGESGLGKSTLVNSLFLTDLYRDRKLLGAEERIMQTVEITKHAVDIEEKGVRLRLTIVDTPGFGDAVNNTECWKPVAEYIDQQFEQYFRDESGLNRKNIQDNRVHCCLYFISPFGHGLRPLDVEFMKALHQRVNIVPILAKADTLTPPEVDHKKRKIREEIEHFGIKIYQFPDCDSDEDEDFKLQDQALKESIPFAVIGSNTVVEARGRRVRGRLYPWGIVEVENPGHCDFVKLRTMLVRTHMQDLKDVTRETHYENYRAQCIQSMTRLVVKERNRNKLTRESGTDFPIPAVPPGTDPETEKLIREKDEELRRMQEMLHKIQKQMKENY

SEQ ID NO: 35442 - protein, 274 aa, Homo sapiens
  REGION 1..274: note = ENSP00000402348
MIKRFLEDTTDDGELSKFVKDFSGNASCHPPEAKTWASRPQVPEPRPQAPDLYDDDLEFRPPSRPQSSDNQQYFCAPAPLSPSARPRSPWGKLDPYDSSEDDKEYVGFATLPNQVHRKSVKKGFDFTLMVAGESGLGKSTLVNSLFLTDLYRDRKLLGAEERIMQTVEITKHAVDIEEKGVRLRLTIVDTPGFGDAVNNTECWKPVAEYIDQQFEQYFRDESGLNRKNIQDNRVHCCLYFISPFGHGYGPSLRLLAPPGAVKGTGQEHQGQGCH

SEQ ID NO: 35443 - protein, 332 aa, Homo sapiens
  REGION 1..332: note = ENSP00000464373
MDRSLGWQGNSVPEDRTEAGDDKEYVGFATLPNQVHRKSVKKGFDFTLMVAGESGLGKSTLVNSLFLTDLYRDRKLLGAEERIMQTVEITKHAVDIEEKGVRLRLTIVDTPGFGDAVNNTECWKPVAEYIDQQFEQYFRDESGLNRKNIQDNRVHCCLYFISPFGHGLRPLDVEFMKALHQRVNIVPILAKADTLTPPEVDHKKRKIREEIEHFGIKIYQFPDCDSDEDEDFKLQDQALKESIPFAVIGSNTVVEARGRRVRGRLYPWGIVEVENPGHCDFVKLRTMLVRTHMQDLKDVTRETHYENYRAQCIQSMTRLVVKERNRKDRSRN

SEQ ID NO: 35444 - protein, 478 aa, Homo sapiens
  REGION 1..478: note = ENSP00000321674
MDRSLGWQGNSVPEDRTEAGIKRFLEDTTDDGELSKFVKDFSGNASCHPPEAKTWASRPQVPEPRPQAPDLYDDDLEFRPPSRPQSSDNQQYFCAPAPLSPSARPRSPWGKLDPYDSSEDDKEYVGFATLPNQVHRKSVKKGFDFTLMVAGESGLGKSTLVNSLFLTDLYRDRKLLGAEERIMQTVEITKHAVDIEEKGVRLRLTIVDTPGFGDAVNNTECWKPVAEYIDQQFEQYFRDESGLNRKNIQDNRVHCCLYFISPFGHGLRPLDVEFMKALHQRVNIVPILAKADTLTPPEVDHKKRKIREEIEHFGIKIYQFPDCDSDEDEDFKLQDQALKESIPFAVIGSNTVVEARGRRVRGRLYPWGIVEVENPGHCDFVKLRTMLVRTHMQDLKDVTRETHYENYRAQCIQSMTRLVVKERNRNKLTRESGTDFPIPAVPPGTDPETEKLIREKDEELRRMQEMLHKIQKQMKENY

SEQ ID NO: 35445 - protein, 493 aa, Homo sapiens
  REGION 1..493: note = ENSP00000402000
MRSSPALFSSRAAPQKPRKEGSQAAGLLVFSDSLEIKRFLEDTTDDGELSKFVKDFSGNASCHPPEAKTWASRPQVPEPRPQAPDLYDDDLEFRPPSRPQSSDNQQYFCAPAPLSPSARPRSPWGKLDPYDSSEDDKEYVGFATLPNQVHRKSVKKGFDFTLMVAGESGLGKSTLVNSLFLTDLYRDRKLLGAEERIMQTVEITKHAVDIEEKGVRLRLTIVDTPGFGDAVNNTECWKPVAEYIDQQFEQYFRDESGLNRKNIQDNRVHCCLYFISPFGHGLRPLDVEFMKALHQRVNIVPILAKADTLTPPEVDHKKRKIREEIEHFGIKIYQFPDCDSDEDEDFKLQDQALKESIPFAVIGSNTVVEARGRRVRGRLYPWGIVEVENPGHCDFVKLRTMLVRTHMQDLKDVTRETHYENYRAQCIQSMTRLVVKERNRNKLTRESGTDFPIPAVPPGTDPETEKLIREKDEELRRMQEMLHKIQKQMKENY

SEQ ID NO: 35446 - protein, 379 aa, Homo sapiens
  REGION 1..379: note = ENSP00000462727
MDRSLGWQGNSVPEDRTEAGDDKEYVGFATLPNQVHRKSVKKGFDFTLMVAGESGLGKSTLVNSLFLTDLYRDRKLLGAEERIMQTVEITKHAVDIEEKGVRLRLTIVDTPGFGDAVNNTECWKPVAEYIDQQFEQYFRDESGLNRKNIQDNRVHCCLYFISPFGHGLRPLDVEFMKALHQRVNIVPILAKADTLTPPEVDHKKRKIREEIEHFGIKIYQFPDCDSDEDEDFKLQDQALKESIPFAVIGSNTVVEARGRRVRGRLYPWGIVEVENPGHCDFVKLRTMLVRTHMQDLKDVTRETHYENYRAQCIQSMTRLVVKERNRNKLTRESGTDFPIPAVPPGTDPETEKLIREKDEELRRMQEMLHKIQKQMKENY

SEQ ID NO: 35447 - protein, 459 aa, Homo sapiens
  REGION 1..459: note = ENSP00000321071
MIKRFLEDTTDDGELSKFVKDFSGNASCHPPEAKTWASRPQVPEPRPQAPDLYDDDLEFRPPSRPQSSDNQQYFCAPAPLSPSARPRSPWGKLDPYDSSEDDKEYVGFATLPNQVHRKSVKKGFDFTLMVAGESGLGKSTLVNSLFLTDLYRDRKLLGAEERIMQTVEITKHAVDIEEKGVRLRLTIVDTPGFGDAVNNTECWKPVAEYIDQQFEQYFRDESGLNRKNIQDNRVHCCLYFISPFGHGLRPLDVEFMKALHQRVNIVPILAKADTLTPPEVDHKKRKIREEIEHFGIKIYQFPDCDSDEDEDFKLQDQALKESIPFAVIGSNTVVEARGRRVRGRLYPWGIVEVENPGHCDFVKLRTMLVRTHMQDLKDVTRETHYENYRAQCIQSMTRLVVKERNRNKLTRESGTDFPIPAVPPGTDPETEKLIREKDEELRRMQEMLHKIQKQMKENY

SEQ ID NO: 35448 - protein, 470 aa, Homo sapiens
  REGION 1..470: note = ENSP00000414779
MPGFYSVMTDEEIKRFLEDTTDDGELSKFVKDFSGNASCHPPEAKTWASRPQVPEPRPQAPDLYDDDLEFRPPSRPQSSDNQQYFCAPAPLSPSARPRSPWGKLDPYDSSEDDKEYVGFATLPNQVHRKSVKKGFDFTLMVAGESGLGKSTLVNSLFLTDLYRDRKLLGAEERIMQTVEITKHAVDIEEKGVRLRLTIVDTPGFGDAVNNTECWKPVAEYIDQQFEQYFRDESGLNRKNIQDNRVHCCLYFISPFGHGLRPLDVEFMKALHQRVNIVPILAKADTLTPPEVDHKKRKIREEIEHFGIKIYQFPDCDSDEDEDFKLQDQALKESIPFAVIGSNTVVEARGRRVRGRLYPWGIVEVENPGHCDFVKLRTMLVRTHMQDLKDVTRETHYENYRAQCIQSMTRLVVKERNRNKLTRESGTDFPIPAVPPGTDPETEKLIREKDEELRRMQEMLHKIQKQMKENY

SEQ ID NO: 35449 - protein, 175 aa, Homo sapiens
  REGION 1..175: note = ENSP00000464382
MDDKEYVGFATLPNQVHRKSVKKGFDFTLMVAGESGLGKSTLVNSLFLTDLYRDRKLLGAEERIMQTVEITKHAVDIEEKGVRLRLTIVDTPGFGDAVNNTECWKPVAEYIDQQFEQYFRDESGLNRKNIQDNRVHCCLYFISPFGHGYGPSLRLLAPPGAVKGTGQEHQGQGCH

SEQ ID NO: 35450 - protein, 207 aa, Homo sapiens
  REGION 1..207: note = ENSP00000463671
MGPVPTSFGKRRGGPQTLPASPGGMDDKEYVGFATLPNQVHRKSVKKGFDFTLMVAGESGLGKSTLVNSLFLTDLYRDRKLLGAEERIMQTVEITKHAVDIEEKGVRLRLTIVDTPGFGDAVNNTECWKPVAEYIDQQFEQYFRDESGLNRKNIQDNRVHCCLYFISPFGHGLRPLDVEFMKALHQRVNIVPILAKADTLTPPEVDH

SEQ ID NO: 35451 - protein, 55 aa, Homo sapiens
  REGION 1..55: note = ENSP00000462278
MDRSLGWQGNSVPEDRTEAGIKRFLEDTTDDGELSKMTRSMWALQPSPTKSTESP

SEQ ID NO: 35452 - protein, 36 aa, Homo sapiens
  REGION 1..36: note = ENSP00000462362
MIKRFLEDTTDDGELSKMTRSMWALQPSPTKSTESP

SEQ ID NO: 35453 - protein, 225 aa, Homo sapiens
  REGION 1..225: note = ENSP00000463461
MGPVPTSFGKRRGGPQTLPASPGGMIKRFLEDTTDDGELSKFVKDFSGNASCHPPEAKTWASRPQVPEPRPQAPDLYDDDLEFRPPSRPQSSDNQQYFCAPAPLSPSARPRSPWGKLDPYDSSEDDKEYVGFATLPNQVHRKSVKKGFDFTLMVAGESGLGKSTLVNSLFLTDLYRDRKLLGAEERIMQTVEITKHAVDIEEKGVRLRLTIVDTPGFGDAVNNTE

SEQ ID NO: 35454 - protein, 72 aa, Homo sapiens
  REGION 1..72: note = ENSP00000464360
MIKRFLEDTTDDGELSKFVKDFSGNASCHPPEAKTWASRPQVPEPRPQAPDLYDDDLEFRPPSRPQSSDNQQ

SEQ ID NO: 35455 - protein, 459 aa, Homo sapiens; identical to SEQ ID NO: 35447
  REGION 1..459: note = ENSP00000376801

SEQ ID NO: 35456 - protein, 77 aa, Homo sapiens
  REGION 1..77: note = ENSP00000489466
MSVSARSAAAEERSVNSSTMVAQQKNLEGYVGFANLPNQVYRKSVKRGFEFTLMVVGESGLGKSTLINSLFLTDLYS

SEQ ID NO: 35457 - protein, 76 aa, Homo sapiens
  REGION 1..76: note = ENSP00000489044
MSVSARSAAAEERSVNSSTMAQQKNLEGYVGFANLPNQVYRKSVKRGFEFTLMVVGESGLGKSTLINSLFLTDLYS

SEQ ID NO: 35458 - protein, 384 aa, Homo sapiens
  REGION 1..384: note = ENSP00000381992
MVVGESGLGKSTLINSLFLTDLYSPEYPGPSHRIKKTVQVEQSKVLIKEGGVQLLLTIVDTPGFGDAVDNSNCWQPVIDYIDSKFEDYLNAESRVNRRQMPDNRVQCCLYFIAPSGHGLKPLDIEFMKRLHEKVNIIPLIAKADTLTPEECQQFKKQIMKEIQEHKIKIYEFPETDDEEENKLVKKIKDRLPLAVVGSNTIIEVNGKRVRGRQYPWGVAEVENGEHCDFTILRNMLIRTHMQDLKDVTNNVHYENYRSRKLAAVTYNGVDNNKNKGQLTKSPLAQMEEERREHVAKMKKMEMEMEQVFEMKVKEKVQKLKDSEAELQRRHEQMKKNLEAQHKELEEKRRQFEDEKANWEAQQRILEQQNSSRTLEKNKKKGKIF

SEQ ID NO: 35459 - protein, 401 aa, Homo sapiens
  REGION 1..401: note = ENSP00000413507
MSVSARSAAAEERSVNSSTMGESGLGKSTLINSLFLTDLYSPEYPGPSHRIKKTVQVEQSKVLIKEGGVQLLLTIVDTPGFGDAVDNSNCWQPVIDYIDSKFEDYLNAESRVNRRQMPDNRVQCCLYFIAPSGHGLKPLDIEFMKRLHEKVNIIPLIAKADTLTPEECQQFKKQIMKEIQEHKIKIYEFPETDDEEENKLVKKIKDRLPLAVVGSNTIIEVNGKRVRGRQYPWGVAEVENGEHCDFTILRNMLIRTHMQDLKDVTNNVHYENYRSRKLAAVTYNGVDNNKNKGQLTKSPLAQMEEERREHVAKMKKMEMEMEQVFEMKVKEKVQKLKDSEAELQRRHEQMKKNLEAQHKELEEKRRQFEDEKANWEAQQRILEQQNSSRTLEKNKKKGKIF

SEQ ID NO: 35460 - protein, 147 aa, Homo sapiens
  REGION 1..147: note = ENSP00000489538
MVVGESGLGKSTLINSLFLTDLYSPEYPGPSHRIKKTVQVEQSKVLIKEGGVQLLLTIVDTPGFGDAVDNSNCWQPVIDYIDSKFEDYLNAESRVNRRQMPDNRVQCCLYFIAPSGHGLKPLDIEFMKRLHEKVNIIPLIAKADTLT

SEQ ID NO: 35461 - protein, 157 aa, Homo sapiens
  REGION 1..157: note = ENSP00000489480
MVVGESGLGKSTLINSLFLTDLYSPEYPGPSHRIKKTVQVEQSKVLIKEGGVQLLLTIVDTPGFGDAVDNSNCWQPVIDYIDSKFEDYLNAESRVNRRQMPDNRVQCCLYFIAPSGHGLKPLDIEFMKRLHEKVNIIPLIAKADTLTPEECQQFKKQ

SEQ ID NO: 35462 - protein, 46 aa, Homo sapiens
  REGION 1..46: note = ENSP00000489192
SARSAAAEERSVNSSTMVPLWISSVGIWNTGMMEMCSLQSSSTEEP

SEQ ID NO: 35463 - protein, 111 aa, Homo sapiens
  REGION 1..111: note = ENSP00000489596
VTYNGVDNNKNKGQLTKHLMITLNIRDRSPLAQMEEERREHVAKMKKMEMEMEQVFEMKVKEKVQKLKDSEAELQRRHEQMKKNLEAQHKELEEKRRQFEDEKANWEAQQR

SEQ ID NO: 35464 - protein, 437 aa, Homo sapiens
  REGION 1..437: note = ENSP00000344868
MSVSARSAAAEERSVNSSTMGQQQKNLEGYVGFANLPNQVYRKSVKRGFEFTLMVVGESGLGKSTLINSLFLTDLYSPEYPGPSHRIKKTVQVEQSKVLIKEGGVQLLLTIVDTPGFGDAVDNSNCWQPVIDYIDSKFEDYLNAESRVNRRQMPDNRVQCCLYFIAPSGHGLKPLDIEFMKRLHEKVNIIPLIAKADTLTPEECQQFKKQIMKEIQEHKIKIYEFPETDDEEENKLVKKIKDRLPLAVVGSNTIIEVNGKRVRGRQYPWGVAEVENGEHCDFTILRNMLIRTHMQDLKDVTNNVHYENYRSRKLAAVTYNGVDNNKNKGQLTKSPLAQMEEERREHVAKMKKMEMEMEQVFEMKVKEKVQKLKDSEAELQRRHEQMKKNLEAQHKELEEKRRQFEDEKANWEAQQRILEQQNSSRTLEKNKKKGKIF

SEQ ID NO: 35465 - protein, 88 aa, Homo sapiens
  REGION 1..88: note = ENSP00000444240
MKKMEMEMEQVFEMKVKEKVQKLKDSEAELQRRHEQMKKNLEAQHKELEEKRRQFEDEKANWEAQQRILEQQNSSRTLEKNKKKGKIF

SEQ ID NO: 35466 - protein, 417 aa, Homo sapiens
  REGION 1..417: note = ENSP00000381993
MKQQKNLEGYVGFANLPNQVYRKSVKRGFEFTLMVVGESGLGKSTLINSLFLTDLYSPEYPGPSHRIKKTVQVEQSKVLIKEGGVQLLLTIVDTPGFGDAVDNSNCWQPVIDYIDSKFEDYLNAESRVNRRQMPDNRVQCCLYFIAPSGHGLKPLDIEFMKRLHEKVNIIPLIAKADTLTPEECQQFKKQIMKEIQEHKIKIYEFPETDDEEENKLVKKIKDRLPLAVVGSNTIIEVNGKRVRGRQYPWGVAEVENGEHCDFTILRNMLIRTHMQDLKDVTNNVHYENYRSRKLAAVTYNGVDNNKNKGQLTKSPLAQMEEERREHVAKMKKMEMEMEQVFEMKVKEKVQKLKDSEAELQRRHEQMKKNLEAQHKELEEKRRQFEDEKANWEAQQRILEQQNSSRTLEKNKKKGKIF

SEQ ID NO: 35467 - protein, 464 aa, Homo sapiens
  REGION 1..464: note = ENSP00000362814
MDGRMMRSMRLREEESPGPSHTASCLCGSAPCILCSCCPASRNSTVSRLIFTFFLFLGVLVSIIMLSPGVESQLYKLPWVCEEGAGIPTVLQGHIDCGSLLGYRAVYRMCFATAAFFFFFTLLMLCVSSSRDPRAAIQNGFWFFKFLILVGLTVGAFYIPDGSFTNIWFYFGVVGSFLFILIQLVLLIDFAHSWNQRWLGKAEECDSRAWYAGLFFFTLLFYLLSIAAVALMFMYYTEPSGCHEGKVFISLNLTFCVCVSIAAVLPKVQDAQPNSGLLQASVITLYTMFVTWSALSSIPEQKCNPHLPTQLGNETVVAGPEGYETQWWDAPSIVGLIIFLLCTLFISLRSSDHRQVNSLMQTEECPPMLDATQQQQQVAACEGRAFDNEQDGVTYSYSFFHFCLVLASLHVMMTLTNWYKPGETRKMISTWTAVWVKICASWAGLLLYLWTLVAPLLLRNRDFS

SEQ ID NO: 35468 - protein, 455 aa, Homo sapiens
  REGION 1..455: note = ENSP00000362813
MGACLGACSLLSCASCLCGSAPCILCSCCPASRNSTVSRLIFTFFLFLGVLVSIIMLSPGVESQLYKLPWVCEEGAGIPTVLQGHIDCGSLLGYRAVYRMCFATAAFFFFFTLLMLCVSSSRDPRAAIQNGFWFFKFLILVGLTVGAFYIPDGSFTNIWFYFGVVGSFLFILIQLVLLIDFAHSWNQRWLGKAEECDSRAWYAGLFFFTLLFYLLSIAAVALMFMYYTEPSGCHEGKVFISLNLTFCVCVSIAAVLPKVQDAQPNSGLLQASVITLYTMFVTWSALSSIPEQKCNPHLPTQLGNETVVAGPEGYETQWWDAPSIVGLIIFLLCTLFISLRSSDHRQVNSLMQTEECPPMLDATQQQQQVAACEGRAFDNEQDGVTYSYSFFHFCLVLASLHVMMTLTNWYKPGETRKMISTWTAVWVKICASWAGLLLYLWTLVAPLLLRNRDFS

SEQ ID NO: 35469 - protein, 459 aa, Homo sapiens
  REGION 1..459: note = ENSP00000439048
MGAEGAPDFLSCPRVRRASCLCGSAPCILCSCCPASRNSTVSRLIFTFFLFLGVLVSIIMLSPGVESQLYKLPWVCEEGAGIPTVLQGHIDCGSLLGYRAVYRMCFATAAFFFFFTLLMLCVSSSRDPRAAIQNGFWFFKFLILVGLTVGAFYIPDGSFTNIWFYFGVVGSFLFILIQLVLLIDFAHSWNQRWLGKAEECDSRAWYAGLFFFTLLFYLLSIAAVALMFMYYTEPSGCHEGKVFISLNLTFCVCVSIAAVLPKVQDAQPNSGLLQASVITLYTMFVTWSALSSIPEQKCNPHLPTQLGNETVVAGPEGYETQWWDAPSIVGLIIFLLCTLFISLRSSDHRQVNSLMQTEECPPMLDATQQQQQVAACEGRAFDNEQDGVTYSYSFFHFCLVLASLHVMMTLTNWYKPGETRKMISTWTAVWVKICASWAGLLLYLWTLVAPLLLRNRDFS

SEQ ID NO: 35470 - protein, 459 aa, Homo sapiens
  REGION 1..459: note = ENSP00000444307
MRSMRLREEESPGPSHTASCLCGSAPCILCSCCPASRNSTVSRLIFTFFLFLGVLVSIIMLSPGVESQLYKLPWVCEEGAGIPTVLQGHIDCGSLLGYRAVYRMCFATAAFFFFFTLLMLCVSSSRDPRAAIQNGFWFFKFLILVGLTVGAFYIPDGSFTNIWFYFGVVGSFLFILIQLVLLIDFAHSWNQRWLGKAEECDSRAWYAGLFFFTLLFYLLSIAAVALMFMYYTEPSGCHEGKVFISLNLTFCVCVSIAAVLPKVQDAQPNSGLLQASVITLYTMFVTWSALSSIPEQKCNPHLPTQLGNETVVAGPEGYETQWWDAPSIVGLIIFLLCTLFISLRSSDHRQVNSLMQTEECPPMLDATQQQQQVAACEGRAFDNEQDGVTYSYSFFHFCLVLASLHVMMTLTNWYKPGETRKMISTWTAVWVKICASWAGLLLYLWTLVAPLLLRNRDFS

SEQ ID NO: 35471 - protein, 66 aa, Homo sapiens
  REGION 1..66: note = ENSP00000420076
MVAKQRIRMANEKHSKNITQRGNVAKTSRNAPEEKASVGPWLLALFIFVVCGSAIFQIIQSIRMGM

SEQ ID NO: 35472 - protein, 55 aa, Homo sapiens
  REGION 1..55: note = ENSP00000420002
MVAKQRIRMANEKHSKNITQRGNVAKTSQFSRLFKVSGWACEVTDLKMFPFSCEF

SEQ ID NO: 35473 - protein, 78 aa, Homo sapiens
  REGION 1..78: note = ENSP00000419472
MVAKQRIRMANEKHSKNITQRGNVAKTSRNAPEEKASVGPWLLALFIFVVCGSGKWLGGSHQVESWVERIWDDVVTGQ

SEQ ID NO: 35474 - protein, 66 aa, Homo sapiens; identical to SEQ ID NO: 35471
  REGION 1..66: note = ENSP00000239944

SEQ ID NO: 35475 - protein, 379 aa, Homo sapiens
  REGION 1..379: note = ENSP00000370115
MEQLSSANTRFALDLFLALSENNPAGNIFISPFSISSAMAMVFLGTRGNTAAQLSKTFHFNTVEEVHSRFQSLNADINKRGASYILKLANRLYGEKTYNFLPEFLVSTQKTYGADLASVDFQHASEDARKTINQWVKGQTEGKIPELLASGMVDNMTKLVLVNAIYFKGNWKDKFMKEATTNAPFRLNKKDRKTVKMMYQKKKFAYGYIEDLKCRVLELPYQGEELSMVILLPDDIEDESTGLKKIEEQLTLEKLHEWTKPENLDFIEVNVSLPRFKLEESYTLNSDLARLGVQDLFNSSKADLSGMSGARDIFISKIVHKSFVEVNEEGTEAAAATAGIATFCMLMPEENFTADHPFLFFIRHNSSGSILFLGRFSSP

SEQ ID NO: 35476 - protein, 397 aa, Homo sapiens
  REGION 1..397: note = ENSP00000386412
MNWHLPLFLLASVTLPSICSHFNPLSLEELGSNTGIQVFNQIVKSRPHDNIVISPHGIASVLGMLQLGADGRTKKQLAMVMRYGVNGVGKILKKINKAIVSKKNKDIVTVANAVFVKNASEIEVPFVTRNKDVFQCEVRNVNFEDPASACDSINAWVKNETRDMIDNLLSPDLIDGVLTRLVLVNAVYFKGLWKSRFQPENTKKRTFVAADGKSYQVPMLAQLSVFRCGSTSAPNDLWYNFIELPYHGESISMLIALPTESSTPLSAIIPHISTKTIDSWMSIMVPKRVQVILPKFTAVAQTDLKEPLKVLGITDMFDSSKANFAKITRSENLHVSHILQKAKIEVSEDGTKASAATTAILIARSSPPWFIVDRPFLFFIRHNPTGAVLFMGQINKP

SEQ ID NO: 35477 - protein, 398 aa, Homo sapiens
  REGION 1..398: note = ENSP00000258405
MNWHLPLFLLASVTLPSICSHFNPLSLEELGSNTGIQVFNQIVKSRPHDNIVISPHGIASVLGMLQLGADGRTKKQLAMVMRYGVNGVGKILKKINKAIVSKKNKDIVTVANAVFVKNASEIEVPFVTRNKDVFQCEVRNVNFEDPASACDSINAWVKNETRDMIDNLLSPDLIDGVLTRLVLVNAVYFKGLWKSRFQPENTKKRTFVAADGKSYQVPMLAQLSVFRCGSTSAPNDLWYNFIELPYHGESISMLIALPTESSTPLSAIIPHISTKTIDSWMSIMVPKRVQVILPKFTAVAQTDLKEPLKVLGITDMFDSSKANFAKITTGSENLHVSHILQKAKIEVSEDGTKASAATTAILIARSSPPWFIVDRPFLFFIRHNPTGAVLFMGQINKP

SEQ ID NO: 35478 - protein, 397 aa, Homo sapiens; identical to SEQ ID NO: 35476
  REGION 1..397: note = ENSP00000386969

SEQ ID NO: 35479 - protein, 409 aa, Homo sapiens
  REGION 1..409: note = ENSP00000415786
MSDCRSSLVEGTMNWHLPLFLLASVTLPSICSHFNPLSLEELGSNTGIQVFNQIVKSRPHDNIVISPHGIASVLGMLQLGADGRTKKQLAMVMRYGVNGVGKILKKINKAIVSKKNKDIVTVANAVFVKNASEIEVPFVTRNKDVFQCEVRNVNFEDPASACDSINAWVKNETRDMIDNLLSPDLIDGVLTRLVLVNAVYFKGLWKSRFQPENTKKRTFVAADGKSYQVPMLAQLSVFRCGSTSAPNDLWYNFIELPYHGESISMLIALPTESSTPLSAIIPHISTKTIDSWMSIMVPKRVQVILPKFTAVAQTDLKEPLKVLGITDMFDSSKANFAKITRSENLHVSHILQKAKIEVSEDGTKASAATTAILIARSSPPWFIVDRPFLFFIRHNPTGAVLFMGQINKP

SEQ ID NO: 35480 - protein, 275 aa, Homo sapiens
  REGION 1..275: note = ENSP00000408452
MNWHLPLFLLASVTLPSICSHFNPLSLEELGSNTGIQVFNQIVKSRPHDNIVISPHGIASVLGMLQLGADGRTKKQLAMVMRYGVNGVGKILKKINKAIVSKKNKDIVTVANAVFVKNASEIEVPFVTRNKDVFQCEVRNVNFEDPASACDSINAWVKNETRDMIDNLLSPDLIDGVLTRLVLVNAVYFKGLWKSRFQPENTKKRTFVAADGKSYQVPMLAQLSVFRCGSTSAPNDLWYNFIELPYHGESISMLIALPTESSTPLSAIIPHISTK

SEQ ID NO: 35481 - protein, 86 aa, Homo sapiens
  REGION 1..86: note = ENSP00000399655
MNWHLPLFLLASVTLPSICSHFNPLSLEELGSNTGIQVFNQIVKSRPHDNIVISPHGIASVLGMLQLGADGRTKKQLAMVMRYGVN

SEQ ID NO: 35482 - protein, 42 aa, Homo sapiens
  REGION 1..42: note = ENSP00000394518
MNWHLPLFLLASVTLPSICSHFNPLSLEELGSNTGIQVFNQI

SEQ ID NO: 35483 - protein, 418 aa, Homo sapiens
  REGION 1..418: note = ENSP00000434657
MRSLLLLSAFCLLEAALAAEVKKPAAAAAPGTAEKLSPKAATLAERSAGLAFSLYQAMAKDQAVENILVSPVVVASSLGLVSLGGKATTASQAKAVLSAEQLRDEEVHAGLGELLRSLSNSTARNVTWKLGSRLYGPSSVSFADDFVRSSKQHYNCEHSKINFRDKRSALQSINEWAAQTTDGKLPEVTKDVERTDGALLVNAMFFKPHWDEKFHHKMVDNRGFMVTRSYTVGVMMMHRTGLYNYYDDEKEKLQIVEMPLAHKLSSLIILMPHHVEPLERLEKLLTKEQLKIWMGKMQKKAVAISLPKGVVEVTHDLQKHLAGLGLTEAIDKNKADLSRMSGKKDLYLASVFHATAFELDTDGNPFDQDIYGREELRSPKLFYADHPFIFLVRDTQSGSLLFIGRLVRPKGDKMRDEL

SEQ ID NO: 35484 - protein, 418 aa, Homo sapiens; identical to SEQ ID NO: 35483
  REGION 1..418: note = ENSP00000350894

SEQ ID NO: 35485 - protein, 85 aa, Homo sapiens
  REGION 1..85: note = ENSP00000431384
MRSLLLLSAFCLLEAATLAERSAGLAFSLYQAMAKDQAVENILVSPVVVASSLGLVSLGGKATTASQAKAVLSAEQLRDEEVHAG

SEQ ID NO: 35486 - protein, 249 aa, Homo sapiens
  REGION 1..249: note = ENSP00000434964
MRSLLLLSAFCLLEAALAAEVKKPAAAAAPGTAEKLSPKAATLAERSAGLAFSLYQAMAKDQAVENILVSPVVVASSLGLVSLGGKATTASQAKAVLSAEQLRDEEVHAGLGELLRSLSNSTARNVTWKLGSRLYGPSSVSFADDFVRSSKQHYNCEHSKINFRDKRSALQSINEWAAQTTDGKLPEVTKDVERTDGALLVNAMFFKPHWDEKFHHKMVDNRGFMVTRSYTVGVMMMHRTGLYNYYDDE

SEQ ID NO: 35487 - protein, 166 aa, Homo sapiens
  REGION 1..166: note = ENSP00000435936
MRSLLLLSAFCLLEAALAAEVKKPAAAAAPGTAEKLSPKAATLAERSAGLAFSLYQAMAKDQAVENILVSPVVVASSLGLVSLGGKATTASQAKAVLSAEQLRDEEVHAGLGELLRSLSNSTARNVTWKLGSRLYGPSSVSFADDFVRSSKQHYNCEHSKINFRDK

SEQ ID NO: 35488 - protein, 142 aa, Homo sapiens
  REGION 1..142: note = ENSP00000434482
MRSLLLLSAFCLLEAALAAEVKKPAAAAAPGTAEKLSPKATTASQAKAVLSAEQLRDEEVHAGLGELLRSLSNSTARNVTWKLGSRLYGPSSVSFADDFVRSSKQHYNCEHSKINFRDKRSALQSINEWAAQTTDGKLPEVT

SEQ ID NO: 35489 - protein, 324 aa, Homo sapiens
  REGION 1..324: note = ENSP00000436305
MRSLLLLSAFCLLEAALAAEVKKPAAAAAPGTAEKLSPKAATLAERSAGLAFSLYQAMAKDQAVENILVSPVVVASSLGLVSLGGKATTASQAKAVLSAEQLRDEEVHAGLGELLRSLSNSTARNVTWKLGSRLYGPSSVSFADDFVRSSKQHYNCEHSKINFRDKRSALQSINEWAAQTTDGKLPEVTKDVERTDGALLVNAMFFKPHWDEKFHHKMVDNRGFMVTRSYTVGVMMMHRTGLYNYYDDEKEKLQIVEMPLAHKLSSLIILMPHHVEPLERLEKLLTKEQLKIWMGKMQKKAVAISLPKGVVEVTHDLQVRGGPA

SEQ ID NO: 35490 - protein, 295 aa, Homo sapiens
  REGION 1..295: note = ENSP00000436040
MRSLLLLSAFCLLEAALAAEVKKPAAAAAPGTAEKLSPKAATLAERSAGLAFSLYQAMAKDQAVENILVSPVVVASSLGLVSLGGKATTASQAKAVLSAEQLRDEEVHAGLGELLRSLSNSTARNVTWKLGSRLYGPSSVSFADDFVRSSKQHYNCEHSKINFRDKRSALQSINEWAAQTTDGKLPEVTKDVERTDGALLVNAMFFKPHWDEKFHHKMVDNRGFMVTRSYTVGVMMMHRTGLYNYYDDEKEKLQIVEMPLAHKLSSLIILMPHHVEPLERLEKLLTKEQLKIWMG

SEQ ID NO: 35491 - protein, 418 aa, Homo sapiens; identical to SEQ ID NO: 35483
  REGION 1..418: note = ENSP00000434412

SEQ ID NO: 35492 - protein, 165 aa, Homo sapiens
  REGION 1..165: note = ENSP00000432007
MRSLLLLSAFCLLEAALAAEVKKPAAAAAPGTAEKLSPKAATLAERSAGLAFSLYQAMAKDQAVENILVSPVVVASSLGLVSLGGKATTASQAKAVLSAEQLRDEEVHAGLGELLRSLSNSTARNVTWKLGSRLYGPSSVSFADDFVRSSKQHYNCEHSKINFRD

SEQ ID NO: 35493 - protein, 150 aa, Homo sapiens
  REGION 1..150: note = ENSP00000431827
MRSLLLLSAFCLLEAALAAEVKKPAAAAAPGTAEKLSPKAATLAERSAGLAFSLYQAMAKDQAVENILVSPVVVASSLGLVSLGGKATTASQAKAVLSAEQLRDEEVHAGLGELLRSLSNSTARNVTWKLGSRLYGPSSVSFADDFVRSS

SEQ ID NO: 35494 - protein, 247 aa, Homo sapiens
  REGION 1..247: note = ENSP00000435452
MRSLLLLSAFCLLEAALAAEVKKPAAAAAPGTAEKLSPKAATLAERSAGLAFSLYQAMAKDQAVENILVSPVVVASSLGLVSLGGKATTASQAKAVLSAEQLRDEEVHAGLGELLRSLSNSTARNVTWKLGSRLYGPSSVSFADDFVRSSKQHYNCEHSKINFRDKRSALQSINEWAAQTTDGKLPEVTKDVERTDGALLVNAMFFKPHWDEKFHHKMVDNRGFMVTRSYTVGVMMMHRTGLYNYYD

SEQ ID NO: 35495 - protein, 203 aa, Homo sapiens
  REGION 1..203: note = ENSP00000437108
MRSLLLLSAFCLLEAALAAEVKKPAAAAAPGTAEKLSPKAATLAERSAGLAFSLYQAMAKDQAVENILVSPVVVASSLGLVSLGGKATTASQAKAVLSAEQLRDEEVHAGLGELLRSLSNSTARNVTWKLGSRLYGPSSVSFADDFVRSSKQHYNCEHSKINFRDKRSALQSINEWAAQTTDGKLPEVTKDVERTDGALLVNA

SEQ ID NO: 35496 - protein, 201 aa, Homo sapiens
  REGION 1..201: note = ENSP00000433532
MVDNRGFMVTRSYTVGVMMMHRTGLYNYYDDEKEKLQIVEMPLAHKLSSLIILMPHHVEPLERLEKLLTKEQLKIWMGKMQKKAVAISLPKGVVEVTHDLQKHLAGLGLTEAIDKNKADLSRMSGKKDLYLASVFHATAFELDTDGNPFDQDIYGREELRSPKLFYADHPFIFLVRDTQSGSLLFIGRLVRPKGDKMRDEL

SEQ ID NO: 35497 - protein, 56 aa, Homo sapiens
  REGION 1..56: note = ENSP00000436306
  VARIANT 1: note = Any amino acid
XNPFDQDIYGREELRSPKLFYADHPFIFLVRDTQSGSLLFIGRLVRPKGDKMRDEL

SEQ ID NO: 35498 - protein, 160 aa, Homo sapiens
  REGION 1..160: note = ENSP00000420133
MAFLGLFSLLVLQSMATGATFPEEAIADLSVNMYNRLRATGEDENILFSPLSIALAMGMMELGAQGSTQKEIRHSMGYDSLKNGEEFSFLKEFSNMVTAKESQYVMKIANSLFVQNGFHVNEEFLQMMKKYFNAAVNHVDFSQNVAVANYINKWVENNTN

SEQ ID NO: 35499 - protein, 410 aa, Homo sapiens
  REGION 1..410: note = ENSP00000397373
MAFLGLFSLLVLQSMATGATFPEEAIADLSVNMYNRLRATGEDENILFSPLSIALAMGMMELGAQGSTQKEIRHSMGYDSLKNGEEFSFLKEFSNMVTAKESQYVMKIANSLFVQNGFHVNEEFLQMMKKYFNAAVNHVDFSQNVAVANYINKWVENNTNNLVKDLVSPRDFDAATYLALINAVYFKGNWKSQFRPENTRTFSFTKDDESEVQIPMMYQQGEFYYGEFSDGSNEAGGIYQVLEIPYEGDEISMMLVLSRQEVPLATLEPLVKAQLVEEWANSVKKQKVEVYLPRFTVEQEIDLKDVLKALGITEIFIKDANLTGLSDNKEIFLSKAIHKSFLEVNEEGSEAAAVSGMIAISRMAVLYPQVIVDHPFFFLIRNRRTGTILFMGRVMHPETMNTSGHDFEEL

SEQ ID NO: 35500 - protein, 410 aa, Homo sapiens; identical to SEQ ID NO: 35499
  REGION 1..410: note = ENSP00000295777

SEQ ID NO: 35501 - protein, 245 aa, Homo sapiens
  REGION 1..245: note = ENSP00000420561
MAFLGLFSLLVLQSMATGATFPEEAIADLSVNMYNRLRATGEDENILFSPLSIALAMGMMELGAQGSTQKEIRHSMGYDSLKNGEEFSFLKEFSNMVTAKESQYVMKIANSLFVQNGFHVNEEFLQMMKKYFNAAVNHVDFSQNVAVANYINKWVENNTNNLVKDLVSPRDFDAATYLALINAVYFKGNWKSQFRPENTRTFSFTKDDESEVQIPMMYQQGEFYYGEFSDGSNEAGGIYQVLEIP

SEQ ID NO: 35502 - protein, 119 aa, Homo sapiens
  REGION 1..119: note = ENSP00000420807
  VARIANT 1: note = Any amino acid
XSRFTVEQEIDLKDVLKALGITEIFIKDANLTGLSDNKEIFLSKAIHKSFLEVNEEGSEAAAVSGMIAISRMAVLYPQVIVDHPFFFLIRNRRTGTILFMGRVMHPETMNTSGHDFEEL

SEQ ID NO: 35503 - protein, 405 aa, Homo sapiens
  REGION 1..405: note = ENSP00000420621
MDTIFLWSLLLLFFGSQASRCSAQKNTEFAVDLYQEVSLSHKDNIIFSPLGITLVLEMVQLGAKGKAQQQIRQTLKQQETSAGEEFFVLKSFFSAISEKKQEFTFNLANALYLQEGFTVKEQYLHGNKEFFQSAIKLVDFQDAKACAEMISTWVERKTDGKIKDMFSGEEFGPLTRLVLVNAIYFKGDWKQKFRKEDTQLINFTKKNGSTVKIPMMKALLRTKYGYFSESSLNYQVLELSYKGDEFSLIIILPAEGMDIEEVEKLITAQQILKWLSEMQEEEVEISLPRFKVEQKVDFKDVLYSLNITEIFSGGCDLSGITDSSEVYVSQVTQKVFFEINEDGSEAATSTGIHIPVIMSLAQSQFIANHPFLFIMKHNPTESILFMGRVTNPDTQEIKGRDLDSL

SEQ ID NO: 35504 - protein, 405 aa, Homo sapiens; identical to SEQ ID NO: 35503
  REGION 1..405: note = ENSP00000417692

SEQ ID NO: 35505 - protein, 405 aa, Homo sapiens; identical to SEQ ID NO: 35503
  REGION 1..405: note = ENSP00000419407

SEQ ID NO: 35506 - protein, 206 aa, Homo sapiens
  REGION 1..206: note = ENSP00000417752
MDTIFLWSLLLLFFGSQASRCSAQKNTEFAVDLYQEVSLSHKDNIIFSPLGITLVLEMVQLGAKGKAQQQIRQTLKQQETSAGEEFFVLKSFFSAISEKKQEFTFNLANALYLQEGFTVKEQYLHGNKEFFQSAIKLVDFQDAKACAEMISTWVERKTDGKIKDMFSGEEFGPLTRLVLVNAIYFKGDWKQKFRKEDTQLINFTKK

SEQ ID NO: 35507 - protein, 157 aa, Homo sapiens
  REGION 1..157: note = ENSP00000419255
MDTIFLWSLLLLFFGSQASRCSAQKNTEFAVDLYQEVSLSHKDNIIFSPLGITLVLEMVQLGAKGKAQQQIRQTLKQQETSAEKKQEFTFNLANALYLQEGFTVKEQYLHGNKEFFQSAIKLVDFQDAKACAEMISTWVERKTDGKIKDMFSGEEFG

SEQ ID NO: 35508 - protein, 405 aa, Homo sapiens; identical to SEQ ID NO: 35503
  REGION 1..405: note = ENSP00000264677

SEQ ID NO: 35509 - protein, 415 aa, Homo sapiens
  REGION 1..415: note = ENSP00000481699
MIQNLMREVKMDTIFLWSLLLLFFGSQASRCSAQKNTEFAVDLYQEVSLSHKDNIIFSPLGITLVLEMVQLGAKGKAQQQIRQTLKQQETSAGEEFFVLKSFFSAISEKKQEFTFNLANALYLQEGFTVKEQYLHGNKEFFQSAIKLVDFQDAKACAEMISTWVERKTDGKIKDMFSGEEFGPLTRLVLVNAIYFKGDWKQKFRKEDTQLINFTKKNGSTVKIPMMKALLRTKYGYFSESSLNYQVLELSYKGDEFSLIIILPAEGMDIEEVEKLITAQQILKWLSEMQEEEVEISLPRFKVEQKVDFKDVLYSLNITEIFSGGCDLSGITDSSEVYVSQVTQKVFFEINEDGSEAATSTGIHIPVIMSLAQSQFIANHPFLFIMKHNPTESILFMGRVTNPDTQEIKGRDLDSL

SEQ ID NO: 35510 - protein, 107 aa, Homo sapiens
  REGION 1..107: note = ENSP00000325776
MSEPDTSSGFSGSVENGTFLELFPTSLSTSVDPSSGHLSNVYIYVSIFLSLLAFLLLLLIIALQRLKNIISSSSSYPEYPSDAGSSFTNLEVCSISSQRSTFSNLSS

SEQ ID NO: 35511 - protein, 696 aa, Homo sapiens
  REGION 1..696: note = ENSP00000415332
MEASVILPILKKKLAFLSGGKDRRSGLILTIPLCLEQTNMDELSVTLDYLLSIPSEKCKARGFTVIVDGRKSQWNVVKTVVVMLQNVVPAEVSLVCVVKPDEFWDKKVTHFCFWKEKDRLGFEVILVSANKLTRYIEPCQLTEDFGGSLTYDHMDWLNKRLVFEKFTKESTSLLDELALINNGSDKGNQQEKERSVDLNFLPSVDPETVLQTGHELLSELQQRRFNGSDGGVSWSPMDDELLAQPQVMKLLDSLREQYTRYQEVCRQRSKRTQLEEIQQKVMQVVNWLEGPGSEQLRAQWGIGDSIRASQALQQKHEEIESQHSEWFAVYVELNQQIAALLNAGDEEDLVELKSLQQQLSDVCYRQASQLEFRQNLLQAALEFHGVAQDLSQQLDGLLGMLCVDVAPADGASIQQTLKLLEEKLKSVDVGLQGLREKGQGLLDQISNQASWAYGKDVTIENKENVDHIQGVMEDMQLRKQRCEDMVDVRRLKMLQMVQLFKCEEDAAQAVEWLSELLDALLKTHIRLGDDAQETKVLLEKHRKFVDVAQSTYDYGRQLLQATVVLCQSLRCTSRSSGDTLPRLNRVWKQFTIASEERVHRLEMAIAFHSNAEKILQDCPEEPEAINDEEQFDEIEAVGKSLLDRLTVPVVYPDGTEQYFGSPSDMASTAENIRDRMKLVNLKRQQLRHPEMVTTES

SEQ ID NO: 35512 - protein, 210 aa, Homo sapiens
  REGION 1..210: note = ENSP00000410632
  VARIANT 1: note = Any amino acid
XQQQLSDVCYRQASQLEFRQNLLQAALEFHGVAQDLSQQLDGLLGMLCVDVAPADGASIQQTLKLLEEKLKSVDVGLQGLREKGQGLLDQISNQASWAYGKDVTIENKENVDHIQGVMEDMQLRKQRCEDMVDVRRLKMLQMVQLFKCEEDAAQAVEWLSELLDALLKTHIRLGDDAQETKVLLEKHRKFVDVAQVQNWLSSFSTSSVFE

SEQ ID NO: 35513 - protein, 106 aa, Homo sapiens
  REGION 1..106: note = ENSP00000334183
  VARIANT 1: note = Any amino acid
XTKESTSLLDELALINNGSDKGNQQEKERSVDLNFLPSVDPETVLQTGHELLSELQQRRFNGSDGGVSWSPMDDELLAQPQVMKLLDSLREQYTRYQEVCREAEKC

SEQ ID NO: 35514 - protein, 225 aa, Homo sapiens
  REGION 1..225: note = ENSP00000391000
RSVDLNFLPSVDPETVLQTGHELLSELQQRRFNGSDGGVSWSPMDDELLAQPQVMKLLDSLREQYTRYQEVCRQRSKRTQLEEIQQKVMQVVNWLEGPGSEQLRAQWGIGDSIRASQALQQKHEEIESQHSEWFAVYVELNQQIAALLNAGDEEDLVELKSLQQQLSDVCYRQASQLEFRQNLLQAALEFHGVAQDMWDCKVCVKKVKVSWIRSPIRHPGPMERM

SEQ ID NO: 35515 - protein, 146 aa, Homo sapiens
  REGION 1..146: note = ENSP00000416164
MEASVILPILKKKLAFLSGGKDRRSGLILTIPLCLEQTNMDELSVTLDYLLSIPSEKCKARGFTVIVDGRKSQWNVVKTVVVMLQNVVPAEVSLVCVVKPDEFWDKKVTHFCFWKEKDRLGFEVILVSANKLTRYIEPCQLTEDFG

SEQ ID NO: 35516 - protein, 143 aa, Homo sapiens
  REGION 1..143: note = ENSP00000410286
MEASVILPILKKKLAFLSGGKDRRSGLILTIPLCLEQTNMDELSVTLDYLLSIPSEKCKARGFTVIVDGRKSQWNVVKTVVVMLQNVVPAEVSLVCVVKPDEFWDKKVTHFCFWKEKDRLGFEVILVSANKLTRYIEPCQLTE

SEQ ID NO: 35517 - protein, 93 aa, Homo sapiens
  REGION 1..93: note = ENSP00000387517
MEASVILPILKKKLAFLSGGKDRRSGLILTIPLCLEQTNMDELSVTLDYLLSIPSEKCKARGFTVIVDGRKSQWNVVKTVVVMLQMSCLGLAV

SEQ ID NO: 35518 - protein, 242 aa, Homo sapiens
  REGION 1..242: note = ENSP00000390687
MESRETLSSSRQRGGESDFLPVSSAKPPAAPGCAGEPLLSTPGPGKGIPVGGERMEPEEEDELGSGRDVDSNSNADSEKWVAGDGLEEQEFSIKEANFTEGSLKLKIQTTKRAKKPPKNLENYICPPEIKITIKQSGDQKVSRAGKNSKATKEEERSHSKKKLLTASDLAASDLKGFQPQIKDSSKEEVWKRRGGQGIPFKKQFLSQERAMCFSCPRNPFPAKPGSLTLPFHSEPAVWAQEV

SEQ ID NO: 35519 - protein, 1596 aa, Homo sapiens
  REGION 1..1596: note = ENSP00000282030
MESRETLSSSRQRGGESDFLPVSSAKPPAAPGCAGEPLLSTPGPGKGIPVGGERMEPEEEDELGSGRDVDSNSNADSEKWVAGDGLEEQEFSIKEANFTEGSLKLKIQTTKRAKKPPKNLENYICPPEIKITIKQSGDQKVSRAGKNSKATKEEERSHSKKKLLTASDLAASDLKGFQPQAYERPQKHSTLHYDTGLPQDFTGDTLKPKHQQKSSSQNHMDWSTNSDSGPVTQNCFISPESGRETASTSKIPALEPVASFAKAQGKKGSAGNTWSQLSNNNKDLLLGGVAPSPSSHSSPAPPSSSAECNGLQPLVDQDGGGTKEPPEPPTVGSKKKSSKKDVISQTIPNPDLDWVKNAQKAFDNTEGKREGYSADSAQEASPARQNVSSASNPENDSSHVRITIPIKAPSLDPTNHKRKKRQSIKAVVEKIMPEKALASGITMSSEVVNRILSNSEGNKKDPRVPKLSKMIENESPSVGLETGGNAEKVIPGGVSKPRKPPMVMTPPTCTDHSPSRKLPEIQHPKFAAKRRWTCSKPKPSTMLREAVMATSDKLMLEPPSAYPITPSSPLYTNTDSLTVITPVKKKRGRPKKQPLLTVETIHEGTSTSPVSPISREFPGTKKRKRRRNLAKLAQLVPGEDKPMSEMKFHKKVGKLGVLDKKTIKTINKMKTLKRKNILNQILSCSSSVALKAKAPPETSPGAAAIESKLGKQINVSKRGTIYIGKKRGRKPRAELPPPSEEPKTAIKHPRPVSSQPDVPAVPSNFQSLVASSPAAMHPLSTQLGGSNGNLSPASTETNFSELKTMPNLQPISALPTKTQKGIHSGTWKLSPPRLMANSPSHLCEIGSLKEITLSPVSESHSEETIPSDSGIGTDNNSTSDQAEKSSESRRRYSFDFCSLDNPEAIPSDTSTKNRHGHRQKHLIVDNFLAHESLKKPKHKRKRKSLQNRDDLQFLADLEELITKFQVFRISHRSYTFYHENPYPSIFRINFDHYYPVPYIQYDPLLYLRRTSDLKSKKKRGRPAKTNDTMTKVPFLQGFSYPIPSGSYYAPYGMPYTSMPMMNLGYYGQYPAPLYLSHTLGAASPFMRPTVPPPQFHTNSHVKMSGAAKHKAKHGVHLQGPVSMGLGDMQPSLNPPKVGSASLSSGRLHKRKHKHKHKHKEDRILGTHDNLSGLFAGKATGFSSHILSERLSSADKELPLVSEKNKHKEKQKHQHSEAGHKASKNNFEVDTLSTLSLSDAQHWTQAKEKGDLSSEPVDSCTKRYSGSGGDGGSTRSENLDVFSEMNPSNDKWDSDVSGSKRRSYEGFGTYREKDIQAFKMNRKERSSYDSSMSPGMPSPHLKVDQTAVHSKNEGSVPTMMTRKKPAAVDSVTIPPAPVLSLLAASAATSDAVGSSLKKRFKRREIEAIQCEVRKMCNYTKILSTKKNLDHVNKILKAKRLQRQSKTGNNFVKKRRGRPRKQPTQFDEDSRDQMPVLEKCIDLPSKRGQKPSLSPLVLEPAASQDTIMATIEAVIHMAREAPPLPPPPPPPLPPPPPPPLPPPPPLPKTPRGGKRKHKPQAPAQPPQQSPPQQPLPQEEEVKAKRQRKSRGSESEVLP

SEQ ID NO: 35520 - protein, 137 aa, Homo sapiens
  REGION 1..137: note = ENSP00000468506
MESRETLSSSRQRGGESDFLPVSSAKPPAAPGCAGEPLLSTPGPGKGIPVGGERMEPEEEDELGSGRDVDSNSNADSEKWVAGDGLEEQEFSIKEANFTEGSLKLKIQTTKRAKKPPKNLENYICPPEIKITIKQSG

SEQ ID NO: 35521 - protein, 809 aa, Homo sapiens
  REGION 1..809: note = ENSP00000319215
MGTPRAQHPPPPQLLFLILLSCPWIQGLPLKEEEILPEPGSETPTVASEALAELLHGALLRRGPEMGYLPGSDRDPTLATPPAGQTLAVPSLPRATEPGTGPLTTAVTPNGVRGAGPTAPELLTPPPGTTAPPPPSPASPGPPLGPEGGEEETTTTIITTTTVTTTVTSPAYLLSCGFPPRPAHGDVSVTDLHPGGTATFHCDSGYQLQGEETLICLNGTRPSWNGETPSCMASCGGTIHNATLGRIVSPEPGGAVGPNLTCRWVIEAAEGRRLHLHFERVSLDEDNDRLMVRSGGSPLSPVIYDSDMDDVPERGLISDAQSLYVELLSETPANPLLLSLRFEAFEEDRCFAPFLAHGNVTTTDPEYRPGALATFSCLPGYALEPPGPPNAIECVDPTEPHWNDTEPACKAMCGGELSEPAGVVLSPDWPQSYSPGQDCVWGVHVQEEKRILLQVEILNVREGDMLTLFDGDGPSARVLAQLRGPQPRRRLLSSGPDLTLQFQAPPGPPNPGLGQGFVLHFKEVPRNDTCPELPPPEWGWRTASHGDLIRGTVLTYQCEPGYELLGSDILTCQWDLSWSAAPPACQKIMTCADPGEIANGHRTASDAGFPVGSHVQYRCLPGYSLEGAAMLTCYSRDTGTPKWSDRVPKCALKYEPCLNPGVPENGYQTLYKHHYQAGESLRFFCYEGFELIGEVTITCVPGHPSQWTSQPPLCKVAYEELLDNRKLEVTQTTDPSRQLEGGNLALAILLPLGLVIVLGSGVYIYYTKLQGKSLFGFSGSHSYSPITVESDFSNPLYEAGDTREYEVSI

SEQ ID NO: 35522 - protein, 853 aa, Homo sapiens
  REGION 1..853: note = ENSP00000310206
MGTPRAQHPPPPQLLFLILLSCPWIQGLPLKEEEILPEPGSETPTVASEALAELLHGALLRRGPEMGYLPGPPLGPEGGEEETTTTIITTTTVTTTVTSPVLCNNNISEGEGYVESPDLGSPVSRTLGLLDCTYSIHVYPGYGIEIQVQTLNLSQEEELLVLAGGGSPGLAPRLLANSSMLGEGQVLRSPTNRLLLHFQSPRVPRGGGFRIHYQAYLLSCGFPPRPAHGDVSVTDLHPGGTATFHCDSGYQLQGEETLICLNGTRPSWNGETPSCMASCGGTIHNATLGRIVSPEPGGAVGPNLTCRWVIEAAEGRRLHLHFERVSLDEDNDRLMVRSGGSPLSPVIYDSDMDDVPERGLISDAQSLYVELLSETPANPLLLSLRFEAFEEDRCFAPFLAHGNVTTTDPEYRPGALATFSCLPGYALEPPGPPNAIECVDPTEPHWNDTEPACKAMCGGELSEPAGVVLSPDWPQSYSPGQDCVWGVHVQEEKRILLQVEILNVREGDMLTLFDGDGPSARVLAQLRGPQPRRRLLSSGPDLTLQFQAPPGPPNPGLGQGFVLHFKEVPRNDTCPELPPPEWGWRTASHGDLIRGTVLTYQCEPGYELLGSDILTCQWDLSWSAAPPACQKIMTCADPGEIANGHRTASDAGFPVGSHVQYRCLPGYSLEGAAMLTCYSRDTGTPKWSDRVPKCALKYEPCLNPGVPENGYQTLYKHHYQAGESLRFFCYEGFELIGEVTITCVPGHPSQWTSQPPLCKVAYEELLDNRKLEVTQTTDPSRQLEGGNLALAILLPLGLVIVLGSGVYIYYTKLQGKSLFGFSGSHSYSPITVESDFSNPLYEAGDTREYEVSI

SEQ ID NO: 35523 - protein, 910 aa, Homo sapiens
  REGION 1..910: note = ENSP00000312550
MGTPRAQHPPPPQLLFLILLSCPWIQGLPLKEEEILPEPGSETPTVASEALAELLHGALLRRGPEMGYLPGSDRDPTLATPPAGQTLAVPSLPRATEPGTGPLTTAVTPNGVRGAGPTAPELLTPPPGTTAPPPPSPASPGPPLGPEGGEEETTTTIITTTTVTTTVTSPVLCNNNISEGEGYVESPDLGSPVSRTLGLLDCTYSIHVYPGYGIEIQVQTLNLSQEEELLVLAGGGSPGLAPRLLANSSMLGEGQVLRSPTNRLLLHFQSPRVPRGGGFRIHYQAYLLSCGFPPRPAHGDVSVTDLHPGGTATFHCDSGYQLQGEETLICLNGTRPSWNGETPSCMASCGGTIHNATLGRIVSPEPGGAVGPNLTCRWVIEAAEGRRLHLHFERVSLDEDNDRLMVRSGGSPLSPVIYDSDMDDVPERGLISDAQSLYVELLSETPANPLLLSLRFEAFEEDRCFAPFLAHGNVTTTDPEYRPGALATFSCLPGYALEPPGPPNAIECVDPTEPHWNDTEPACKAMCGGELSEPAGVVLSPDWPQSYSPGQDCVWGVHVQEEKRILLQVEILNVREGDMLTLFDGDGPSARVLAQLRGPQPRRRLLSSGPDLTLQFQAPPGPPNPGLGQGFVLHFKEVPRNDTCPELPPPEWGWRTASHGDLIRGTVLTYQCEPGYELLGSDILTCQWDLSWSAAPPACQKIMTCADPGEIANGHRTASDAGFPVGSHVQYRCLPGYSLEGAAMLTCYSRDTGTPKWSDRVPKCALKYEPCLNPGVPENGYQTLYKHHYQAGESLRFFCYEGFELIGEVTITCVPGHPSQWTSQPPLCKVTQTTDPSRQLEGGNLALAILLPLGLVIVLGSGVYIYYTKLQGKSLFGFSGSHSYSPITVESDFSNPLYEAGDTREYEVSI

SEQ ID NO: 35524 - protein, 303 aa, Homo sapiens
  REGION 1..303: note = ENSP00000454654
  VARIANT 1: note = Any amino acid
XCLNGTRPSWNGETPSCMASCGGTIHNATLGRIVSPEPGGAVGPNLTCRWVIEAAEGRRLHLHFERVSLDEDNDRLMVRSGGSPLSPVIYDSDMDDVPERGLISDAQSLYVELLSETPANPLLLSLRFEAMCGGELSEPAGVVLSPDWPQSYSPGQDCVWGVHVQEEKRILLQVEILNVREGDMLTLFDGDGPSARVLAQLRGPQPRRRLLSSGPDLTLQFQAPPGPPNPGLGQGFVLHFKEVPRNDTCPELPPPEWGWRTASHGDLIRGTVLTYQCEPGYELLGSDILTCQWDLSWSAAPPA

SEQ ID NO: 35525 - protein, 80 aa, Homo sapiens
  REGION 1..80: note = ENSP00000458490
MGTPRAQHPPPPQLLFLILLSCPWIQGSDRDPTLATPPAGQTLAVPSLPRATEPGTGPLTTAVTPNGVRGAGPTAPELLT

SEQ ID NO: 35526 - protein, 879 aa, Homo sapiens
  REGION 1..879: note = ENSP00000439412
MGTPRAQHPPPPQLLFLILLSCPWIQGSDRDPTLATPPAGQTLAVPSLPRATEPGTGPLTTAVTPNGVRGAGPTAPELLTPPPGTTAPPPPSPASPGPPLGPEGGEEETTTTIITTTTVTTTVTSPVLCNNNISEGEGYVESPDLGSPVSRTLGLLDCTYSIHVYPGYGIEIQVQTLNLSQEEELLVLAGGGSPGLAPRLLANSSMLGEGQVLRSPTNRLLLHFQSPRVPRGGGFRIHYQAYLLSCGFPPRPAHGDVSVTDLHPGGTATFHCDSGYQLQGEETLICLNGTRPSWNGETPSCMASCGGTIHNATLGRIVSPEPGGAVGPNLTCRWVIEAAEGRRLHLHFERVSLDEDNDRLMVRSGGSPLSPVIYDSDMDDVPERGLISDAQSLYVELLSETPANPLLLSLRFEAFEEDRCFAPFLAHGNVTTTDPEYRPGALATFSCLPGYALEPPGPPNAIECVDPTEPHWNDTEPACKAMCGGELSEPAGVVLSPDWPQSYSPGQDCVWGVHVQEEKRILLQVEILNVREGDMLTLFDGDGPSARVLAQLRGPQPRRRLLSSGPDLTLQFQAPPGPPNPGLGQGFVLHFKEVPRNDTCPELPPPEWGWRTASHGDLIRGTVLTYQCEPGYELLGSDILTCQWDLSWSAAPPACQKIMTCADPGEIANGHRTASDAGFPVGSHVQYRCLPGYSLEGAAMLTCYSRDTGTPKWSDRVPKCALKYEPCLNPGVPENGYQTLYKHHYQAGESLRFFCYEGFELIGEVTITCVPGHPSQWTSQPPLCKVAYEELLDNRKLEVTQTTDPSRQLEGGNLALAILLPLGLVIVLGSGVYIYYTKLQGKSLFGFSGSHSYSPITVESDFSNPLYEAGDTREYEVSI

SEQ ID NO: 35527 - protein, 923 aa, Homo sapiens
  REGION 1..923: note = ENSP00000481917
MGTPRAQHPPPPQLLFLILLSCPWIQGLPLKEEEILPEPGSETPTVASEALAELLHGALLRRGPEMGYLPGSDRDPTLATPPAGQTLAVPSLPRATEPGTGPLTTAVTPNGVRGAGPTAPELLTPPPGTTAPPPPSPASPGPPLGPEGGEEETTTTIITTTTVTTTVTSPVLCNNNISEGEGYVESPDLGSPVSRTLGLLDCTYSIHVYPGYGIEIQVQTLNLSQEEELLVLAGGGSPGLAPRLLANSSMLGEGQVLRSPTNRLLLHFQSPRVPRGGGFRIHYQAYLLSCGFPPRPAHGDVSVTDLHPGGTATFHCDSGYQLQGEETLICLNGTRPSWNGETPSCMASCGGTIHNATLGRIVSPEPGGAVGPNLTCRWVIEAAEGRRLHLHFERVSLDEDNDRLMVRSGGSPLSPVIYDSDMDDVPERGLISDAQSLYVELLSETPANPLLLSLRFEAFEEDRCFAPFLAHGNVTTTDPEYRPGALATFSCLPGYALEPPGPPNAIECVDPTEPHWNDTEPACKAMCGGELSEPAGVVLSPDWPQSYSPGQDCVWGVHVQEEKRILLQVEILNVREGDMLTLFDGDGPSARVLAQLRGPQPRRRLLSSGPDLTLQFQAPPGPPNPGLGQGFVLHFKEVPRNDTCPELPPPEWGWRTASHGDLIRGTVLTYQCEPGYELLGSDILTCQWDLSWSAAPPACQKIMTCADPGEIANGHRTASDAGFPVGSHVQYRCLPGYSLEGAAMLTCYSRDTGTPKWSDRVPKCALKYEPCLNPGVPENGYQTLYKHHYQAGESLRFFCYEGFELIGEVTITCVPGHPSQWTSQPPLCKVAYEELLDNRKLEVTQTTDPSRQLEGGNLALAILLPLGLVIVLGSGVYIYYTKLQGKSLFGFSGSHSYSPITVESDFSNPLYEAGDTREYEVSI

SEQ ID NO: 35528 - protein, 424 aa, Homo sapiens
  REGION 1..424: note = ENSP00000271628
MAAGPISERNQDATVYVGGLDEKVSEPLLWELFLQAGPVVNTHMPKDRVTGQHQGYGFVEFLSEEDADYAIKIMNMIKLYGKPIRVNKASAHNKNLDVGANIFIGNLDPEIDEKLLYDTFSAFGVILQTPKIMRDPDTGNSKGYAFINFASFDASDAAIEAMNGQYLCNRPITVSYAFKKDSKGERHGSAAERLLAAQNPLSQADRPHQLFADAPPPPSAPNPVVSSLGSGLPPPGMPPPGSFPPPVPPPGALPPGIPPAMPPPPMPPGAAGHGPPSAGTPGAGHPGHGHSHPHPFPPGGMPHPGMSQMQLAHHGPHGLGHPHAGPPGSGGQPPPRPPPGMPHPGPPPMGMPPRGPPFGSPMGHPGPMPPHGMRGPPPLMPPHGYTGPPRPPPYGYQRGPLPPPRPTPRPPVPPRGPLRGPLPQ

SEQ ID NO: 35529 - protein, 190 aa, Homo sapiens
  REGION 1..190: note = ENSP00000391114
MPKDRVTGQHQGYGFVEFLSEEDADYAIKIMNMIKLYGKPIRVNKASAHNKNLDVGANIFIGNLDPEIDEKLLYDTFSAFGVILQTPKIMRDPDTGNSKGYAFINFASFDASDAAIEAMNGQYLCNRPITVSYAFKKDSKGERHGSAAERLLAAQNPLSQADRPHQLFADAPPPPSAPNPVVSSLGSGLP

SEQ ID NO: 35530 - protein, 340 aa, Homo sapiens
  REGION 1..340: note = ENSP00000272433
MADTATTASAAAASAASASSDAPPFQLGKPRFQQTSFYGRFRHFLDIIDPRTLFVTERRLREAVQLLEDYKHGTLRPGVTNEQLWSAQKIKQAILHPDTNEKIFMPFRMSGYIPFGTPIVVGLLLPNQTLASTVFWQWLNQSHNACVNYANRNATKPSPASKFIQGYLGAVISAVSIAVGLNVLVQKANKFTPATRLLIQRFVPFPAVASANICNVVLMRYGELEEGIDVLDSDGNLVGSSKIAARHALLETALTRVVLPMPILVLPPIVMSMLEKTALLQARPRLLLPVQSLVCLAAFGLALPLAISLFPQMSEIETSQLEPEIAQATSSRTVVYNKGL

SEQ ID NO: 35531 - protein, 252 aa, Homo sapiens
  REGION 1..252: note = ENSP00000402141
  VARIANT 1: note = Any amino acid
XAASAASASSDAPPFQLGKPRFQQTSFYGRFRHFLDIIDPRTLFVTERRLREAVQLLEDYKHGTLRPGVTNEQLWSAQKIKQAILHPDTNEKIFMPFRMSGYIPFGTPIVVGLLLPNQTLASTVFWQWLNQSHNACVNYANRNATKPSPASKFIQGYLGAVISAVSIAVGLNVLVQKANKFTPATRLLIQRFVPFPAVGPAGDGADASGPAHAHPGATPDRHVHAGEIETSQLEPEIAQATSSRTVVYNKGL

SEQ ID NO: 35532 - protein, 253 aa, Homo sapiens
  REGION 1..253: note = ENSP00000387076
MADTATTASAAAASAASASSDAPPFQLGKPRFQQTSFYGRFRHFLDIIDPRTLFVTERRLREAVQLLEDYKHGTLRPGVTNEQLWSAQKIKQAILHPDTNEKIFMPFRMSGYIPFGTPIVVGLLLPNQTLASTVFWQWLNQSHNACVNYANRNATKPSPASKFIQGYLGAVISAVSIAVGLNVLVQKANKFTPATRLLIQRFVPFPAVGRLSCRHAPGCSSLCKASCAWQPSAWPCRWPSASSRKCQRLKHPN

SEQ ID NO: 35533 - protein, 88 aa, Homo sapiens
  REGION 1..88: note = ENSP00000398580
MADTATTASAAAASAASASSDAPPFQLGKPRFQQTSFYGRFRHFLDIIDPRTLFVTEMESCTVPQAHCNPCLLGSETSQRGCAAAGGL

SEQ ID NO: 35534 - protein, 156 aa, Homo sapiens
  REGION 1..156: note = ENSP00000396825
MADTATTASAAAASAASASSDAPPFQLGKPRFQQTSFYGRFRHFLDIIDPRTLFVTERRLREAVQLLEDYKHGTLRPGVTNEQLWSAQKIKQVIFLLGRQFRSSLAQPDTGIHCLLWLNQSHNACVNYANRNATKPSPASKFIQGYLGAVISAVSI

SEQ ID NO: 35535 - protein, 65 aa, Homo sapiens
  REGION 1..65: note = ENSP00000423168
MAETLFWTPLLVGKLGPCSAGRPRMRGQDLGVFSWQGWGTPRPSRPRYTHLWAVSLCTPWTMRRF

SEQ ID NO: 35536 - protein, 298 aa, Homo sapiens
  REGION 1..298: note = ENSP00000426571
MAETLFWTPLLVVLLAGLGDTEAQQTTLHPLVGRVFVHTLDHETFLSLPEHVAVPPAVHITYHAHLQGHPDLPRWLRYTQRSPHHPGFLYGSATPEDRGLQVIEVTAYNRDSFDTTRQRLVLEIGDPEGPLLPYQAEFLVRSHDAEEVLPSTPASRFLSALGGLWEPGELQLLNVTSALDRGGRVPLPIEGRKEGVYIKVGSASPFSTCLKMVASPDSHARCAQGQPPLLSCYDTLAPHFRVDWCNVTLAEERPGYLRHPDGPPLHHPREHRGAAADGGQPRGAPATLHPAHVQCAHR

SEQ ID NO: 35537 - protein, 263 aa, Homo sapiens
  REGION 1..263: note = ENSP00000345522
MAETLFWTPLLVVLLAGLGDTEAQQTTLHPLVGRVFVHTLDHETFLSLPEHVAVPPAVHITYHAHLQGHPDLPRWLRYTQRSPHHPGFLYGSATPEDRGLQVIEVTAYNRDSFDTTRQRLVLEIGDPEGPLLPYQAEFLVRSHDAEEVLPSTPASRFLSALGGLWEPGELQLLNVTSALDRGGRVPLPIEGRKEGLKRDLATSDIQMVHHCTIHGNTEELRQMAASREVPRPLSTLPMFNVHTGERLPPRVDSAQVPLILDQH

SEQ ID NO: 35538 - protein, 387 aa, Homo sapiens
  REGION 1..387: note = ENSP00000262018
MAETLFWTPLLVVLLAGLGDTEAQQTTLHPLVGRVFVHTLDHETFLSLPEHVAVPPAVHITYHAHLQGHPDLPRWLRYTQRSPHHPGFLYGSATPEDRGLQVIEVTAYNRDSFDTTRQRLVLEIGDPEGPLLPYQAEFLVRSHDAEEVLPSTPASRFLSALGGLWEPGELQLLNVTSALDRGGRVPLPIEGRKEGVYIKVGSASPFSTCLKMVASPDSHARCAQGQPPLLSCYDTLAPHFRVDWCNVTLVDKSVPEPADEVPTPGDGILEHDPFFCPPTEAPDRDFLVDALVTLLVPLLVALLLTLLLAYVMCCRREGRLKRDLATSDIQMVHHCTIHGNTEELRQMAASREVPRPLSTLPMFNVHTGERLPPRVDSAQVPLILDQH

SEQ ID NO: 35539 - protein, 61 aa, Homo sapiens
  REGION 1..61: note = ENSP00000422817
MAETLFWTPLLVVLLAGLGDTEAQQTTLHPLVGRVFVHTLDHETFLSLPEHVGHSLQSGQL

SEQ ID NO: 35540 - protein, 196 aa, Homo sapiens
  REGION 1..196: note = ENSP00000426104
LRHSSGLLSSWVTAYNRDSFDTTRQRLVLEIGDPEGPLLPYQAEFLVRSHDAEEVLPSTPASRFLSALGGLWEPGELQLLNVTSALDRGGRVPLPIEGRKEGLKRDLATSDIQMVHHCTIHGNTEELRQMAASREVPRPLSTLPMFNVHTVVPGPALTSSSLLCPHHEWHIPPADSSSWPSWNPGSKQAGRGGGVG

SEQ ID NO: 35541 - protein, 58 aa, Homo sapiens
  REGION 1..58: note = ENSP00000426606
  VARIANT 1: note = Any amino acid
XCPTRCPHHLPRPPPGTPRPAPVAPLHPAQPPPPWLPLRLCHPRRSWAPGHSLQSGQL

SEQ ID NO: 35542 - protein, 160 aa, Homo sapiens
  REGION 1..160: note = ENSP00000422030
  VARIANT 1: note = Any amino acid
XLDRGGRVPLPIEGRKEGVYIKVDKSVPEPADEVPTPGDGILEHDPFFCPPTEAPDRDFLVDALVTLLVPLLVALLLTLLLAYVMCCRREGRLKRDLATSDIQMVHHCTIHGNTEELRQMAASREVPRPLSTLPMFNVHTGERLPPRVDSAQVPLILDQH

SEQ ID NO: 35543 - protein, 256 aa, Homo sapiens
  REGION 1..256: note = ENSP00000429378
MMPQEQYTHHRSTMPGSVGPQVYKVGIYGWRKRCLYFFVLLLMILILVNLAMTIWILKVMNFTIDGMGNLRITEKGLKLEGDSEFLQPLYAKEIQSRPGNALYFKSARNVTVNILNDQTKVLTQLITGPKAVEAYGKKFEVKTVSGKLLFSADNNEVVVGAERLRVLGAEGTVFPKSIETPNVRADPFKELRLESPTRSLVMEAPKGVEINAEAGNMEATCRTELRLESKDGEVRDEKDRSSKSYSFNRPTLPITG

SEQ ID NO: 35544 - protein, 289 aa, Homo sapiens
  REGION 1..289: note = ENSP00000403003
MPQEQYTHHRSTMPGSVGPQVYKVGIYGWRKRCLYFFVLLLMILILVNLAMTIWILKVMNFTIDGMGNLRITEKGLKLEGDSEFLQPLYAKEIQSRPGNALYFKSARNVTVNILNDQTKVLTQLITGPKAVEAYGKKFEVKTVSGKLLFSADNNEVVVGAERLRVLGAEGTVFPKSIETPNVRADPFKELRLESPTRSLVMEAPKGVEINAEAGNMEATCRTELRLESKDGEIKLDAAKIRLPRLPHGSYTPTGTRQKVFEICVCANGRLFLSQAGAGSTCQINTSVCL

SEQ ID NO: 35545 - protein, 290 aa, Homo sapiens
  REGION 1..290: note = ENSP00000338343
MMPQEQYTHHRSTMPGSVGPQVYKVGIYGWRKRCLYFFVLLLMILILVNLAMTIWILKVMNFTIDGMGNLRITEKGLKLEGDSEFLQPLYAKEIQSRPGNALYFKSARNVTVNILNDQTKVLTQLITGPKAVEAYGKKFEVKTVSGKLLFSADNNEVVVGAERLRVLGAEGTVFPKSIETPNVRADPFKELRLESPTRSLVMEAPKGVEINAEAGNMEATCRTELRLESKDGEIKLDAAKIRLPRLPHGSYTPTGTRQKVFEICVCANGRLFLSQAGAGSTCQINTSVCL

SEQ ID NO: 35546 - protein, 82 aa, Homo sapiens
  REGION 1..82: note = ENSP00000430794
MMPQEQYTHHRSTMPGSVGPQVYKVGIYGWRKRCLYFFVLLLMILILVNLAMTIWILKVMNFTISIHLLLRFNWLFRCCGMS

SEQ ID NO: 35547 - protein, 367 aa, Homo sapiens
  REGION 1..367: note = ENSP00000362192
MNSSPAGTPSPQPSRANGNINLGPSANPNAQPTDFDFLKVIGKGNYGKVLLAKRKSDGAFYAVKVLQKKSILKKKEQSHIMAERSVLLKNVRHPFLVGLRYSFQTPEKLYFVLDYVNGGELFFHLQRERRFLEPRARFYAAEVASAIGYLHSLNIIYRDLKPENILLDCQGHVVLTDFGLCKEGVEPEDTTSTFCGTPEYLAPEVLRKEPYDRAVDWWCLGAVLYEMLHGLPPFYSQDVSQMYENILHQPLQIPGGRTVAACDLLQSLLHKDQRQRLGSKADFLEIKNHVFFSPINWDDLYHKRLTPPFNPNVTGPADLKHFDPEFTQEAVSKSIGCTPDTVASSSGASSAFLGFSYAPEDDDILDC

SEQ ID NO: 35548 - protein, 358 aa, Homo sapiens
  REGION 1..358: note = ENSP00000362168
MNSSPAGTPSPQPSRANGNINLGPSANPNAQPTDFDFLKVIGKGNYGKVLLAKRKSDGAFYAVKVLQKKSILKKKEQSHIMAERSVLLKNVRHPFLVGLRYSFQTPEKLYFVLDYVNGGELFFHLQRERRFLEPRARFYAAEVASAIGYLHSLNIIYRDLKPENILLDCQGHVVLTDFGLCKEGVEPEDTTSTFCGTPEYLAPEVLRKEPYDRAVDWWCLGAVLYEMLHGLPPFYSQDVSQMYENILHQPLQIPGGRTVAACDLLQSLLHKDQRQRLGSKADFLEIKNHVFFSPINWDDLYHKRLTPPFNPNVDTLGPGTRKASFRWDFKKTVKIMSNLYPGERTIHGILGRDEWTLE

SEQ ID NO: 35549 - protein, 367 aa, Homo sapiens; identical to SEQ ID NO: 35547
  REGION 1..367: note = ENSP00000362184

SEQ ID NO: 35550 - protein, 285 aa, Homo sapiens
  REGION 1..285: note = ENSP00000436841
MNSSPAGTPSPQPSRANGNINLGPSANPNAQPTDFDFLKVIGKGNYGKVLLAKRKSDGAFYAVKVLQKKSILKKKEQSHIMAERSVLLKNVRHPFLVGLRYSFQTPEKLYFVLDYVNGGELFFHLQRERRFLEPRARFYAAEVASAIGYLHSLNIIYRDLKPENILLDCQGHVVLTDFGLCKEGVEPEDTTSTFCGTPEYLAPEVLRKEPYDRAVDWWCLGAVLYEMLHGLPPFYSQDVSQMYENILHQPLQIPGGRTVAACDLLQSLLHKDQRQRLGSKADFVA

SEQ ID NO: 35551 - protein, 10 aa, Homo sapiens
  REGION 1..10: note = ENSP00000481432
MNSSPAGTPS

SEQ ID NO: 35552 - protein, 198 aa, Homo sapiens
  REGION 1..198: note = ENSP00000396222
MNSSPAGTPSPQPSRANGNINLGPSANPNAQPTDFDFLKVIGKGNYGKVLLAKRKSDGAFYAVKVLQKKSILKKKESHIMAERSVLLKNVRHPFLVGLRYSFQTPEKLYFVLDYVNGGELFFHLQRERRFLEPRARFYAAEVASAIGYLHSLNIIYRDLKPENILLDCQGHVVLTDFGLCKEGVEPEDTTSTFCGTPE

SEQ ID NO: 35553 - protein, 427 aa, Homo sapiens
  REGION 1..427: note = ENSP00000340608
MQGLLTSGRKPSGGGRCTGRGGWRGQWCLKPWMGGADPPTPTLSCLLLPVPPELPDHCYRMNSSPAGTPSPQPSRANGNINLGPSANPNAQPTDFDFLKVIGKGNYGKVLLAKRKSDGAFYAVKVLQKKSILKKKEQSHIMAERSVLLKNVRHPFLVGLRYSFQTPEKLYFVLDYVNGGELFFHLQRERRFLEPRARFYAAEVASAIGYLHSLNIIYRDLKPENILLDCQGHVVLTDFGLCKEGVEPEDTTSTFCGTPEYLAPEVLRKEPYDRAVDWWCLGAVLYEMLHGLPPFYSQDVSQMYENILHQPLQIPGGRTVAACDLLQSLLHKDQRQRLGSKADFLEIKNHVFFSPINWDDLYHKRLTPPFNPNVTGPADLKHFDPEFTQEAVSKSIGCTPDTVASSSGASSAFLGFSYAPEDDDILDC

SEQ ID NO: 35554 - protein, 393 aa, Homo sapiens
  REGION 1..393: note = ENSP00000412214
MQGLLTSGRKPSGGGRCTELPDHCYRMNSSPAGTPSPQPSRANGNINLGPSANPNAQPTDFDFLKVIGKGNYGKVLLAKRKSDGAFYAVKVLQKKSILKKKEQSHIMAERSVLLKNVRHPFLVGLRYSFQTPEKLYFVLDYVNGGELFFHLQRERRFLEPRARFYAAEVASAIGYLHSLNIIYRDLKPENILLDCQGHVVLTDFGLCKEGVEPEDTTSTFCGTPEYLAPEVLRKEPYDRAVDWWCLGAVLYEMLHGLPPFYSQDVSQMYENILHQPLQIPGGRTVAACDLLQSLLHKDQRQRLGSKADFLEIKNHVFFSPINWDDLYHKRLTPPFNPNVTGPADLKHFDPEFTQEAVSKSIGCTPDTVASSSGASSAFLGFSYAPEDDDILDC

SEQ ID NO: 35555 - protein, 367 aa, Homo sapiens; identical to SEQ ID NO: 35547
  REGION 1..367: note = ENSP00000392795

SEQ ID NO: 35556 - protein, 365 aa, Homo sapiens
  REGION 1..365: note = ENSP00000378176
MDIIETAKLEEHLENQPSDPTNTYARPAEPVEEENKNGNGKPKSLSSGLRKGTKKYPDYIQIAMPTESRNKFPLEWWKTGIAFIYAVFNLVLTTVMITVVHERVPPKELSPPLPDKFFDYIDRVKWAFSVSEINGIILVGLWITQWLFLRYKSIVGRRFCFIIGTLYLYRCITMYVTTLPVPGMHFQCAPKLNGDSQAKVQRILRLISGGGLSITGSHILCGDFLFSGHTVTLTLTYLFIKEYSPRHFWWYHLICWLLSAAGIICILVAHEHYTIDVIIAYYITTRLFWWYHSMANEKNLKVSSQTNFLSRAWWFPIFYFFEKNVQGSIPCCFSWPLSWPPGCFKSSCKKYSRVQKIGEDNEKST

SEQ ID NO: 35557 - protein, 125 aa, Homo sapiens
  REGION 1..125: note = ENSP00000428176
MYVTTLPVPGMHFQCAPKLNGDSQAKVQRILRLISGGGLSITGSHILCGDFLFSGHTVTLTLTYLFIKEYSPRHFWWYHLICWLLSAAGIICILVAHEHYTIDVIIAYYITTRLFWWYHSMANEK

SEQ ID NO: 35558 - protein, 365 aa, Homo sapiens; identical to SEQ ID NO: 35556
  REGION 1..365: note = ENSP00000351981

SEQ ID NO: 35559 - protein, 34 aa, Homo sapiens
  REGION 1..34: note = ENSP00000428294
MDIIETAKLEEHLENQPSDPTNTYARPAEPVEEE

SEQ ID NO: 35560 - protein, 365 aa, Homo sapiens; identical to SEQ ID NO: 35556
  REGION 1..365: note = ENSP00000378178

SEQ ID NO: 35561 - protein, 44 aa, Homo sapiens
  REGION 1..44: note = ENSP00000430172
MDIIETAKLEEHLENQPSDPTNTYARPAEPVEEENKNGNGKPKS

SEQ ID NO: 35562 - protein, 47 aa, Homo sapiens
  REGION 1..47: note = ENSP00000483034
MDPSYCPAHGFPSQDPLWPLSSQQWSSAHYSEPGLQAQGQHPTVSHH

SEQ ID NO: 35563 - protein, 675 aa, Homo sapiens
  REGION 1..675: note = ENSP00000440273
MDPSYCPAHGFPSQDPLWPLSSQQWSSAHYSEPAAGGCDGTEAMNGAGPGPAAAAPVPVPVPVPDWRQFCELHAQAAAVDFAHKFCRFLRDNPAYDTPDAGASFSRHFAANFLDVFGEEVRRVLVAGPTTRGAAVSAEAMEPELADTSALKAAPYGHSRSSEDVSTHAATKARVRKGFSLRNMSLCVVDGVRDMWHRRASPEPDAAAAPRTAEPRDKWTRRLRLSRTLAAKVELVDIQREGALRFMVADDAAAGSGGSAQWQKCRLLLRRAVAEERFRLEFFVPPKASRPKVSIPLSAIIEVRTTMPLEMPEKDNTFVLKVENGAEYILETIDSLQKHSWVADIQGCVDPGDSEEDTELSCTRGGCLASRVASCSCELLTDAVDLPRPPETTAVGAVVTAPHSRGRDAVRESLIHVPLETFLQTLESPGGSGSDSNNTGEQGAETDPEAEPELELSDYPWFHGTLSRVKAAQLVLAGGPRNHGLFVIRQSETRPGEYVLTFNFQGKAKHLRLSLNGHGQCHVQHLWFQSVLDMLRHFHTHPIPLESGGSADITLRSYVRAQDPPPEPGPTPPAAPASPACWSDSPGQHYFSSLAAAACPPASPSDAAGASSSSASSSSAASGPAPPRPVEGQLSARSRSNSAERLLEAVAATAAEEPPEAAPGRARAVENQYSFY

SEQ ID NO: 35564 - protein, 243 aa, Homo sapiens
  REGION 1..243: note = ENSP00000401883
MNGAGPGPAAAAPVPVPVPVPDWRQFCELHAQAAAVDFAHKFCRFLRDNPAYDTPDAGASFSRHFAANFLDVFGEEVRRVLVAGPTTRGAAVSAEAMEPELADTSALKAAPYGHSRSSEDVSTHAATKARVRKGFSLRNMSLCVVDGVRDMWHRRASPEPDAAAAPRTAEPRDKWTRRLRLSRTLAAKVELVDIQREGALRFMVADDAAAGSGGSAQWQKCRLLLRRAVAEERFRLEFFVPPK

SEQ ID NO: 35565 - protein, 128 aa, Homo sapiens
  REGION 1..128: note = ENSP00000360181
MDAVAVYHGKISRETGEKLLLATGLDGSYLLRDSESVPGVYCLCVLYHGYIYTYRVSQTETGSWSAETAPGVHKRYFRKIKNLISAFQKPDQGIVIPLQYPVEKKSSARSTQGTTGIREDPDVCLKAP

SEQ ID NO: 35566 - protein, 125 aa, Homo sapiens
  REGION 1..125: note = ENSP00000353126
MDAVAVYHGKISRETGEKLLLATGLDGSYLLRDSESVPGVYCLCVLYHGYIYTYRVSQTETGSWSAETAPGVHKRYFRKIKNLISAFQKPDQGIVIPLQYPVEKKSSARSTQGIREDPDVCLKAP

SEQ ID NO: 35567 - protein, 76 aa, Homo sapiens
  REGION 1..76: note = ENSP00000477094
MDAVAVYHGKISRETGEKLLLATGLDGSYLLRDSESVPGITVTFIHTECPRQKQVLGVLSISEARSRHCNTSAVSS

SEQ ID NO: 35568 - protein, 357 aa, Homo sapiens
  REGION 1..357: note = ENSP00000345295
MLQQILHDMYIDPELLAELSDVQKHILFYKMREEQLRRWKERETWEALAQDEGLRPPKTKRAASDKHIQWLLGADGEVWVWIMGEGPGDKPYEEISEELIAERARLQAQREAEELWRQKEAEITKKFRDALANEKARILAEKWKVEMEDRKAAKVLEERIHEEFKRKEEEERKRGEEQIRLQEEQRAKELYWTLKQAQLHCQASEKEEREWEEQLRRSKAADEERSRRAQRARDEYRHHSLRAIQKGTVAGLSSMFRELGQSHEQEARLYHHLPDPGLPQPLALPVRTWERPLRPVSRDVIVRWFKEEQLPRRAGFERNTKFIAPWFHGGNYHCFRRRVTSGTLRTEGQPTRLPSVV

SEQ ID NO: 35569 - protein, 309 aa, Homo sapiens
  REGION 1..309: note = ENSP00000314242
MLPEDSGGSPDAAASDKHIQWLLGADGEVWVWIMGEGPGDKPYEEISEELIAERARLQAQREAEELWRQKEAEITKKFRDALANEKARILAEKWKVEMEDRKAAKVLEERIHEEFKRKEEEERKRGEEQIRLQEEQRAKELYWTLKQAQLHCQASEKEEREWEEQLRRSKAADEERSRRAQRARDEYRHHSLRAIQKGTVAGLSSMFRELGQSHEQEARLYHHLPDPGLPQPLALPVSRTWERPLRPVSRDVIVRWFKEEQLPRRAGFERNTKFIAPWFHGGNYHCFRRRVTSGTLRTEGQPTRLPSVV

SEQ ID NO: 35570 - protein, 107 aa, Homo sapiens
  REGION 1..107: note = ENSP00000358853
MVIRVFIASSSGFVAIKKKQQDVVRFLEANKIEFEEVDITMSEEQRQWMYKNVPPEKKPTQGNPLPPQIFNGDRYCGDYDSFFESKESNTVFSFLGLKPRLASKAEP

SEQ ID NO: 35571 - protein, 561 aa, Homo sapiens
  REGION 1..561: note = ENSP00000409746
MAAEEMHWPVPMKAIGAQNLLTMPGGVAKAGYLHKKGGTQLQLLKWPLRFVIIHKRCVYYFKSSTSASPQGAFSLSGYNRVMRAAEETTSNNVFPFKIIHISKKHRTWFFSASSEEERKSWMALLRREIGHFHEKKDLPLDTSDSSSDTDSFYGAVERPVDISLSPYPTDNEDYEHDDEDDSYLEPDSPEPGRLEDALMHPPAYPPPPVPTPRKPAFSDMPRAHSFTSKGPGPLLPPPPPKHGLPDVGLAAEDSKRDPLCPRRAEPCPRVPATPRRMSDPPLSTMPTAPGLRKPPCFRESASPSPEPWTPGHGACSTSSAAIMATATSRNCDKLKSFHLSPRGPPTSEPPPVPANKPKFLKIAEEDPPREAAMPGLFVPPVAPRPPALKLPVPEAMARPAVLPRPEKPQLPHLQRSPPDGQSFRSFSFEKPRQPSQADTGGDDSDEDYEKVPLPNSVFVNTTESCEVERLFKATSPRGEPQDGLYCIRNSSTKSGKVLVVWDETSNKVRNYRIFEKDSKFYLEGEVLFVSVGSMVEHYHTHVLPSHQSLLLRHPYGYTGPR

SEQ ID NO: 35572 - protein, 142 aa, Homo sapiens
  REGION 1..142: note = ENSP00000422796
MAAEEMHWPVPMKAIGAQNLLTMPGGVAKAGYLHKKGGTQLQLLKWPLRFVIIHKRCVYYFKSSTSASPQGAFSLSGYNRVMRAAEETTSNNVFPFKIIHISKKHRTWFFSASSEEERKSWMALLRREIGHFHEKKDLPLDT

SEQ ID NO: 35573 - protein, 172 aa, Homo sapiens
  REGION 1..172: note = ENSP00000423275
MAAEEMHWPVPMKAIGAQNLLTMPGGVAKAGYLHKKGGTQLQLLKWPLRFVIIHKRCVYYFKSSTSASPQGAFSLSGYNRVMRAAEETTSNNVFPFKIIHISKKHRTWFFSASSEEERKSWMALLRREIGHFHEKKDLPLDTSDSSSDTDSFYGAVERPVDISLSPYPTDNE

SEQ ID NO: 35574 - protein, 188 aa, Homo sapiens
  REGION 1..188: note = ENSP00000424917
MAAEEMHWPVPMKAIGAQNLLTMPGGVAKAGYLHKKGGTQLQLLKWPLRFVIIHKRCVYYFKSSTSASPQGAFSLSGYNRVMRAAEETTSNNVFPFKIIHISKKHRTWFFSASSEEERKSWMALLRREIGHFHEKKDLPLDTSDSSSDTDSFYGAVERPVDISLSPYPTDNEDYEHDDEDDSYLEPDS

SEQ ID NO: 35575 - protein, 97 aa, Homo sapiens
  REGION 1..97: note = ENSP00000424072
MAAEEMHWPVPMKAIGAQNLLTMPGGVAKAGYLHKKGGTQLQLLKWPLRFVIIHKRCVYYFKSSTSASPQGAFSLSGYNRQPRPQPAQALSQTEAGP

SEQ ID NO: 35576 - protein, 194 aa, Homo sapiens
  REGION 1..194: note = ENSP00000424105
MAAEEMHWPVPMKAIGAQNLLTMPGGVAKAGYLHKKGGTQLQLLKWPLRFVIIHKRCVYYFKSSTSASPQGAFSLSGYNRVMRAAEETTSNNVFPFKIIHISKKHRTWFFSASSEEERKSWMALLRREIGHFHEKKDLPLDTSDSSSDTDSFYGAVERPVDISLSPYPTDNEDYEHDDEDDSYLEPDSPEPGRL

SEQ ID NO: 35577 - protein, 136 aa, Homo sapiens
  REGION 1..136: note = ENSP00000423823
MAAEEMHWPVPMKAIGAQNLLTMPGGVAKAGYLHKKGGTQLQLLKWPLRFVIIHKRCVYYFKSSTSASPQGAFSLSGYNRVMRAAEETTSNNVFPFKIIHISKKHRTWFFSASSEEERKSWMALLRREIGHFHEKK

SEQ ID NO: 35578 - protein, 142 aa, Homo sapiens; identical to SEQ ID NO: 35572
  REGION 1..142: note = ENSP00000425537

SEQ ID NO: 35579 - protein, 561 aa, Homo sapiens; identical to SEQ ID NO: 35571
  REGION 1..561: note = ENSP00000403231

SEQ ID NO: 35580 - protein, 561 aa, Homo sapiens; identical to SEQ ID NO: 35571
  REGION 1..561: note = ENSP00000424846

SEQ ID NO: 35581 - protein, 97 aa, Homo sapiens; identical to SEQ ID NO: 35575
  REGION 1..97: note = ENSP00000422605

SEQ ID NO: 35582 - protein, 561 aa, Homo sapiens; identical to SEQ ID NO: 35571
  REGION 1..561: note = ENSP00000348685

SEQ ID NO: 35583 - protein, 190 aa, Homo sapiens
  REGION 1..190: note = ENSP00000426818
  VARIANT 1: note = Any amino acid
XRESASPSPEPWTPGHGACSTSSAAIMATATSRNCDKLKSFHLSPRGPPTSEPPPVPANKPKFLKIAEEDPPREAAMPGLFVPPVAPRPPALKLPVPEAMARPAVLPRPEKPQLPHLQRSPPDGQSFRSFSFEKPRQPSQADTGGDDSDEDYEKVVQGYKPPGRAPGWTLLHPELLYQVGEGPGCVGRNL

SEQ ID NO: 35584 - protein, 589 aa, Homo sapiens
  REGION 1..589: note = ENSP00000388152
MASLGPRTPAPSRSRGRRAMCWVSTISFMAAEEMHWPVPMKAIGAQNLLTMPGGVAKAGYLHKKGGTQLQLLKWPLRFVIIHKRCVYYFKSSTSASPQGAFSLSGYNRVMRAAEETTSNNVFPFKIIHISKKHRTWFFSASSEEERKSWMALLRREIGHFHEKKDLPLDTSDSSSDTDSFYGAVERPVDISLSPYPTDNEDYEHDDEDDSYLEPDSPEPGRLEDALMHPPAYPPPPVPTPRKPAFSDMPRAHSFTSKGPGPLLPPPPPKHGLPDVGLAAEDSKRDPLCPRRAEPCPRVPATPRRMSDPPLSTMPTAPGLRKPPCFRESASPSPEPWTPGHGACSTSSAAIMATATSRNCDKLKSFHLSPRGPPTSEPPPVPANKPKFLKIAEEDPPREAAMPGLFVPPVAPRPPALKLPVPEAMARPAVLPRPEKPQLPHLQRSPPDGQSFRSFSFEKPRQPSQADTGGDDSDEDYEKVPLPNSVFVNTTESCEVERLFKATSPRGEPQDGLYCIRNSSTKSGKVLVVWDETSNKVRNYRIFEKDSKFYLEGEVLFVSVGSMVEHYHTHVLPSHQSLLLRHPYGYTGPR

SEQ ID NO: 35585 - protein, 618 aa, Homo sapiens
  REGION 1..618: note = ENSP00000422168
MAGSGPRPRSWGRREAGARDEAAAAGGRGPGPCRCSQGRRAWIAPGKPAMPAAWTPFMAAEEMHWPVPMKAIGAQNLLTMPGGVAKAGYLHKKGGTQLQLLKWPLRFVIIHKRCVYYFKSSTSASPQGAFSLSGYNRVMRAAEETTSNNVFPFKIIHISKKHRTWFFSASSEEERKSWMALLRREIGHFHEKKDLPLDTSDSSSDTDSFYGAVERPVDISLSPYPTDNEDYEHDDEDDSYLEPDSPEPGRLEDALMHPPAYPPPPVPTPRKPAFSDMPRAHSFTSKGPGPLLPPPPPKHGLPDVGLAAEDSKRDPLCPRRAEPCPRVPATPRRMSDPPLSTMPTAPGLRKPPCFRESASPSPEPWTPGHGACSTSSAAIMATATSRNCDKLKSFHLSPRGPPTSEPPPVPANKPKFLKIAEEDPPREAAMPGLFVPPVAPRPPALKLPVPEAMARPAVLPRPEKPQLPHLQRSPPDGQSFRSFSFEKPRQPSQADTGGDDSDEDYEKVPLPNSVFVNTTESCEVERLFKATSPRGEPQDGLYCIRNSSTKSGKVLVVWDETSNKVRNYRIFEKDSKFYLEGEVLFVSVGSMVEHYHTHVLPSHQSLLLRHPYGYTGPR

SEQ ID NO: 35586 - protein, 963 aa, Homo sapiens
  REGION 1..963: note = ENSP00000375867
MAAQRIRAANSNGLPRCKSEGTLIDLSEGFSETSFNDIKVPSPSALLVDNPTPFGNAKEVIAIKDYCPTNFTTLKFSKGDHLYVLDTSGGEWWYAHNTTEMGYIPSSYVQPLNYRNSTLSDSGMIDNLPDSPDEVAKELELLGGWTDDKKVPGRMYSNNPFWNGVQTNPFLNGNVPVMPSLDELNPKSTVDLLLFDAGTSSFTESSSATTNSTGNIFDELPVTNGLHAEPPVRRDNPFFRSKRSYSLSELSVLQAKSDAPTSSSFFTGLKSPAPEQFQSREDFRTAWLNHRKLARSCHDLDLLGQSPGWGQTQAVETNIVCKLDSSGGAVQLPDTSISIHVPEGHVAPGETQQISMKALLDPPLELNSDRSCSISPVLEVKLSNLEVKTSIILEMKVSAEIKNDLFSKSTVGLQCLRSDSKEGPYVSVPLNCSCGDTVQAQLHNLEPCMYVAVVAHGPSILYPSTVWDFINKKVTVGLYGPKHIHPSFKTVVTIFGHDCAPKTLLVSEVTRQAPNPAPVALQLWGKHQFVLSRPQDLKVCMFSNMTNYEVKASEQAKVVRGFQLKLGKVSRLIFPITSQNPNELSDFTLRVQVKDDQEAILTQFCVQTPQPPPKSAIKPSGQRRFLKKNEVGKIILSPFATTTKYPTFQDRPVSSLKFGKLLKTVVRQNKNHYLLEYKKGDGIALLSEERVRLRGQLWTKEWYIGYYQGRVGLVHTKNVLVVGRARPSLCSGPELSTSVLLEQILRPCKFLTYIYASVRTLLMENISSWRSFADALGYVNLPLTFFCRAELDSEPERVASVLEKLKEDCNNTENKERKSFQKELVMALLKMDCQGLVVRLIQDFVLLTTAVEVAQRWRELAEKLAKVSKQQMDAYESPHRDRNGVVDSEAMWKPAYDFLLTWSHQIGDSYRDVIQELHLGLDKMKNPITKRWKHLTGTLILVNSLDVLRAAAFSPADQDDFVI

SEQ ID NO: 35587 - protein, 122 aa, Homo sapiens
  REGION 1..122: note = ENSP00000403251
MAAQRIRAANSNGLPRCKSEGTLIDLSEGFSETSFNDIKVPSPSALLVDNPTPFGNAKEVIAIKDYCPTNFTTLKFSKGDHLYVLDTSGGEWWYAHNTTEMGYIPSSYVQPLNYRNSTLSDS

SEQ ID NO: 35588 - protein, 963 aa, Homo sapiens; identical to SEQ ID NO: 35586
  REGION 1..963: note = ENSP00000386862

SEQ ID NO: 35589 - protein, 963 aa, Homo sapiens; identical to SEQ ID NO: 35586
  REGION 1..963: note = ENSP00000340237

SEQ ID NO: 35590 - protein, 56 aa, Homo sapiens
  REGION 1..56: note = ENSP00000387995
MAAQRIRAANSNGLPRCKSEGTLIDLSEGFSETSFNDIKVPSPSALLVDNPTPFGN

SEQ ID NO: 35591 - protein, 173 aa, Homo sapiens
  REGION 1..173: note = ENSP00000415391
MAAQRIRAANSNGLPRCKSEGTLIDLSEGFSETSFNDIKVPSPSALLVDNPTPFGNAKEVIAIKDYCPTNFTTLKFSKGDHLYVLDTSGGEWWYAHNTTEMGYIPSSYVQPLNYRNSTLSDSGMIDNLPDSPDEVAKELELLGGWTDDKKVPGRMYSNNPFWNGVQTNPFLNG

SEQ ID NO: 35592 - protein, 57 aa, Homo sapiens
  REGION 1..57: note = ENSP00000414740
MAAQRIRAANSNGLPRCKSEGTLIDLSEGFSETSFNDIKVPSPSALLVDNPTPFGNA

SEQ ID NO: 35593 - protein, 767 aa, Homo sapiens
  REGION 1..767: note = ENSP00000387030
MNIMNTEQSQNSIVSRIKVFEGQTNIETSGLPKKPEITPRSLPPKPTVSSGKPSVAPKPAANRASGEWDSGTENRLKVTSKEGLTPYPPLQEAGSIPVTKPELPKKPNPGLIRSVNPEIPGRGPLAESSDSGKKVPTPAPRPLLLKKSVSSENPTYPSAPLKPVTVPPRLAGASQAKAYKSLGEGPPANPPVPVLQSKPLVDIDLISFDDDVLPTPSGNLAEESVGSEMVLDPFQLPAKTEPIKERAVQPAPTRKPTVIRIPAKPGKCLHEDPQSPPPLPAEKPIGNTFSTVSGKLSNVERTRNLESNHPGQTGGFVRVPPRLPPRPVNGKTIPTQQPPTKVPPERPPPPKLSATRRSNKKLPFNRSSSDMDLQKKQSNLATGLSKAKSQVFKNQDPVLPPRPKPGHPLYSKYMRGDVLVMLKQTENNYLECQKGEDTGRVHLSQMKIITPLDEHLRSRPNDPSHAQKPVDSGAPHAVVLHDFPAEQVDDLNLTSGEIVYLLEKIDTDWYRGNCRNQIGIFPANYVKVIIDIPEGGNGKRECVSSHCVKGSRCVARFEYIGEQKDELSFSEGEIIILKEYVNEEWARGEVRGRTGIFPLNFVEPVEDYPTSGANVLSTKVPLKTKKEDSGSNSQVNSLPAEWCEALHSFTAETSDDLSFKRGDRIQILERLDSDWCRGRLQDREGIFPAVFVRPCPAEAKSMLAIVPKGRKAKALYDFRGENEDELSFKAGDIITELESVDDDWMSGELMGKSGIFPKNYIQFLQIS

SEQ ID NO: 35594 - protein, 790 aa, Homo sapiens
  REGION 1..790: note = ENSP00000386848
MNIMNTEQSQNSIVSRIKVFEGQTNIETSGLPKKPEITPRSLPPKPTVSSGKPSVAPKPAANRASGEWDSGTENRLKVTSKEGLTPYPPLQEAGSIPVTKPELPKKPNPGLIRSVNPEIPGRGPLAESSDSGKKVPTPAPRPLLLKKSVSSENPTYPSAPLKPVTVPPRLAGASQAKAYKSLGEGPPANPPVPVLQSKPLVDIDLISFDDDVLPTPSGNLAEESVGSEMVLDPFQLPAKTEPIKERAVQPAPTRKPTVIRIPAKPGKCLHEDPQSPPPLPAEKPIGNTFSTVSGKLSNVERTRNLESNHPGQTGGFVRVPPRLPPRPVNGKTIPTQQPPTKVPPERPPPPKLSATRRSNKKLPFNRSSSDMDLQKKQSNLATGLSKAKSQVFKNQDPVLPPRPKPGHPLYSKYMLSVPHGIANEDIVSQNPGELSCKRGDVLVMLKQTENNYLECQKGEDTGRVHLSQMKIITPLDEHLRSRPNDPSHAQKPVDSGAPHAVVLHDFPAEQVDDLNLTSGEIVYLLEKIDTDWYRGNCRNQIGIFPANYVKVIIDIPEGGNGKRECVSSHCVKGSRCVARFEYIGEQKDELSFSEGEIIILKEYVNEEWARGEVRGRTGIFPLNFVEPVEDYPTSGANVLSTKVPLKTKKEDSGSNSQVNSLPAEWCEALHSFTAETSDDLSFKRGDRIQILERLDSDWCRGRLQDREGIFPAVFVRPCPAEAKSMLAIVPKGRKAKALYDFRGENEDELSFKAGDIITELESVDDDWMSGELMGKSGIFPKNYIQFLQIS

SEQ ID NO: 35595 - protein, 767 aa, Homo sapiens; identical to SEQ ID NO: 35593
  REGION 1..767: note = ENSP00000423449

SEQ ID NO: 35596 - protein, 1047 aa, Homo sapiens
  REGION 1..1047: note = ENSP00000488951
MAEGRRREDEEEELRERRELGGQRRARGRALSGHSAADRNERNKPEHRSSSQGPLSSIRAVIKRSSRTSIQSELHRDRRRPEITIVAAEPLRPASWFPGTPPPGLGFPTSSAAGSWRPNELVPAELPPSYEQVIKEINQVQVNTTNNNNAAATPRHTITSATQTDFSEEIDNDLPQTLQAPLKPLQPFSAVSSGNLPTNVAPLIVFDISEEPNCPENPSATRCPVPKPRSKSNLRPIPRDSHIKEQSQQKISPAAVGEESSPGRPQSLLDNASTSDSQAVMNIMNTEQSQNSIVSRIKVFEGQTNIETSGLPKKPEITPRSLPPKPTVSSGKPSVAPKPAANRASGEWDSGTENRLKVTSKEGLTPYPPLQEAGSIPVTKPELPKKPNPGLIRSVNPEIPGRGPLAESSDSGKKVPTPAPRPLLLKKSVSSENPTYPSAPLKPVTVPPRLAGASQAKAYKSLGEGPPANPPVPVLQSKPLVDIDLISFDDDVLPTPSGNLAEESVGSEMVLDPFQLPAKTEPIKERAVQPAPTRKPTVIRIPAKPGKCLHEDPQSPPPLPAEKPIGNTFSTVSGKLSNVERTRNLESNHPGQTGGFVRVPPRLPPRPVNGKTIPTQQPPTKVPPERPPPPKLSATRRSNKKLPFNRSSSDMDLQKKQSNLATGLSKAKSQVFKNQDPVLPPRPKPGHPLYSKYMRGDVLVMLKQTENNYLECQKGEDTGRVHLSQMKIITPLDEHLRSRPNDPSHAQKPVDSGAPHAVVLHDFPAEQVDDLNLTSGEIVYLLEKIDTDWYRGNCRNQIGIFPANYVKVIIDIPEGGNGKRECVSSHCVKGSRCVARFEYIGEQKDELSFSEGEIIILKEYVNEEWARGEVRGRTGIFPLNFVEPVEDYPTSGANVLSTKVPLKTKKEDSGSNSQVNSLPAEWCEALHSFTAETSDDLSFKRGDRIQILERLDSDWCRGRLQDREGIFPAVFVRPCPAEAKSMLAIVPKGRKAKALYDFRGENEDELSFKAGDIITELESVDDDWMSGELMGKSGIFPKNYIQFLQIS

SEQ ID NO: 35597 - protein, 731 aa, Homo sapiens
  REGION 1..731: note = ENSP00000415694
MNIMNTEQSQNSIVSRIKVFEGQTNIETSGLPKKPEITPRSLPPKPTVSSGKPSVAPKPAANRASGEWDSGTENRLKVTSKEGLTPYPPLQEAGSIPVTKPELPKKPNPGLIRSVNPEIPGRGPLAESSDSGKKVPTPAPRPLLLKKSVSSENPTYPSAPLKPVTVPPRLAGASQAKAYKSLGEGPPANPPVPVLQSKPLVDIDLISFDDDVLPTPSGNLAEESVGSEMVLGLHEDPQSPPPLPAEKPIGNTFSTVSGKLSNVERTRNLESNHPGQTGGFVRVPPRLPPRPVNGKTIPTQQPPTKVPPERPPPPKLSATRRSNKKLPFNRSSSDMDLQKKQSNLATGLSKAKSQVFKNQDPVLPPRPKPGHPLYSKYMRGDVLVMLKQTENNYLECQKGEDTGRVHLSQMKIITPLDEHLRSRPNDPSHAQKPVDSGAPHAVVLHDFPAEQVDDLNLTSGEIVYLLEKIDTDWYRGNCRNQIGIFPANYVKVIIDIPEGGNGKRECVSSHCVKGSRCVARFEYIGEQKDELSFSEGEIIILKEYVNEEWARGEVRGRTGIFPLNFVEPVEDYPTSGANVLSTKVPLKTKKEDSGSNSQVNSLPAEWCEALHSFTAETSDDLSFKRGDRIQILERLDSDWCRGRLQDREGIFPAVFVRPCPAEAKSMLAIVPKGRKAKALYDFRGENEDELSFKAGDIITELESVDDDWMSGELMGKSGIFPKNYIQFLQIS

SEQ ID NO: 35598 - protein, 233 aa, Homo sapiens
  REGION 1..233: note = ENSP00000489087
  VARIANT 1: note = Any amino acid
XNIETSGLPKKPEITPRSLPPKPTVSSGKPSVAPKPAANRASGEWDSGTENRLKVTSKEGLTPYPPLQEAGSIPVTKPELPKKPNPGLIRSVNPEIPGRGPLAESSDSGKKVPTPAPRPLLLKKSVSSENPTYPSAPLKPVTVPPRLAGASQAKAYKSLGEGPPANPPVPVLQSKPLVDIDLISFDDDVLPTPSGNLAEESVGSEMVLDHVEALPLTRELINNLFKRAEHKHN

SEQ ID NO: 35599 - protein, 790 aa, Homo sapiens; identical to SEQ ID NO: 35594
  REGION 1..790: note = ENSP00000302913

SEQ ID NO: 35600 - protein, 347 aa, Homo sapiens
  REGION 1..347: note = ENSP00000391372
MSVAGLKKQFHKASQLFSEKISGAEGTKLDDEFLDMERKIDVTNKVVAEILSKTTEYLQPNPAYRAKLGMLNTVSKIRGQVKTTGYPQTEGLLGDCMLKYGKELGEDSTFGNALIEVGESMKLMAEVKDSLDINVKQTFIDPLQLLQDKDLKEIGHHLKKLEGRRLDYDYKKKRVGKIPDEEVRQAVEKFEESKELAERSMFNFLENDVEQVSQLAVFIEAALDYHRQSTEILQELQSKLQMRISAASSVPRREYKPRPVKRSSSELNGVSTTSVVKTTGSNIPMDQPCCRGLYDFEPENQGELGFKEGDIITLTNQIDENWYEGMIHGESGFFPINYVEVIVPLPQ

SEQ ID NO: 35601 - protein, 65 aa, Homo sapiens
  REGION 1..65: note = ENSP00000456249
MSVAGLKKQFHKASQLFSEKISGAEGTKLDDEFLDMERKIDVTNKVVAEILSKTTEYLQPNPELS

SEQ ID NO: 35602 - protein, 355 aa, Homo sapiens
  REGION 1..355: note = ENSP00000320092
MDGIFAGIICNQANRCLTWTSQQLFSEKISGAEGTKLDDEFLDMERKIDVTNKVVAEILSKTTEYLQPNPAYRAKLGMLNTVSKIRGQVKTTGYPQTEGLLGDCMLKYGKELGEDSTFGNALIEVGESMKLMAEVKDSLDINVKQTFIDPLQLLQDKDLKEIGHHLKKLEGRRLDYDYKKKRVGKIPDEEVRQAVEKFEESKELAERSMFNFLENDVEQVSQLAVFIEAALDYHRQSTEILQELQSKLQMRISAASSVPRREYKPRPVKRSSSELNGVSTTSVVKTTGSNIPMDQPCCRGLYDFEPENQGELGFKEGDIITLTNQIDENWYEGMIHGESGFFPINYVEVIVPLPQ

SEQ ID NO: 35603 - protein, 888 aa, Homo sapiens
  REGION 1..888: note = ENSP00000284637
MDESALLDLLECPVCLERLDASAKVLPCQHTFCKRCLLGIVGSRNELRCPECRTLVGSGVEELPSNILLVRLLDGIKQRPWKPGPGGGSGTNCTNALRSQSSTVANCSSKDLQSSQGGQQPRVQSWSPPVRGIPQLPCAKALYNYEGKEPGDLKFSKGDIIILRRQVDENWYHGEVNGIHGFFPTNFVQIIKPLPQPPPQCKALYDFEVKDKEADKDCLPFAKDDVLTVIRRVDENWAEGMLADKIGIFPISYVEFNSAAKQLIEWDKPPVPGVDAGECSSAAAQSSTAPKHSDTKKNTKKRHSFTSLTMANKSSQASQNRHSMEISPPVLISSSNPTAAARISELSGLSCSAPSQVHISTTGLIVTPPPSSPVTTGPSFTFPSDVPYQAALGTLNPPLPPPPLLAATVLASTPPGATAAAAAAGMGPRPMAGSTDQIAHLRPQTRPSVYVAIYPYTPRKEDELELRKGEMFLVFERCQDGWFKGTSMHTSKIGVFPGNYVAPVTRAVTNASQAKVPMSTAGQTSRGVTMVSPSTAGGPAQKLQGNGVAGSPSVVPAAVVSAAHIQTSPQAKVLLHMTGQMTVNQARNAVRTVAAHNQERPTAAVTPIQVQNAAGLSPASVGLSHHSLASPQPAPLMPGSATHTAAISISRASAPLACAAAAPLTSPSITSASLEAEPSGRIVTVLPGLPTSPDSASSACGNSSATKPDKDSKKEKKGLLKLLSGASTKRKPRVSPPASPTLEVELGSAELPLQGAVGPELPPGGGHGRAGSCPVDGDGPVTTAVAGAALAQDAFHRKASSLDSAVPIAPPPRQACSSLGPVLNESRPVVCERHRVVVSYPPQSEAELELKEGDIVFVHKKREDGWFKGTLQRNGKTGLFPGSFVENI

SEQ ID NO: 35604 - protein, 303 aa, Homo sapiens
  REGION 1..303: note = ENSP00000426418
  VARIANT 1: note = Any amino acid
XKALYNYEGKEPGDLKFSKGDIIILRRQVDENWYHGEVNGIHGFFPTNFVQIIKPLPQPPPQCKALYDFEVKDKEADKDCLPFAKDDVLTVIRRVDENWAEGMLADKIGIFPISYVEFNSAAKQLIEWDKPPVPGVDAGECSSAAAQSSTAPKHSDTKKNTKKRHSFTSLTMANKSSQASQNRHSMEISPPVLISSSNPTAAARISELSGLSCSAPSQVHISTTGLIVTPPPSSPVTTGPSFTFPSDVPYQAALGAPPPLLLLLEWDRGPWQDPLTRLHIYGRRLAPVCMLLYIHTLLGKRMN

SEQ ID NO: 35605 - protein, 99 aa, Homo sapiens
  REGION 1..99: note = ENSP00000427585
MDESALLDLLECPVCLERLDASAKVLPCQHTFCKRCLLGIVGSRNELRCPECRTLVGSGVEELPSNILLVRLLDGIKQRPWKPGPGGGSGTNCTNALRS

SEQ ID NO: 35606 - protein, 79 aa, Homo sapiens
  REGION 1..79: note = ENSP00000421714
MDESALLDLLECPVCLERLDASAKVLPCQHTFCKRCLLGIVGSRNELRCPECRTLVGSGVEELPSNILLVRLLDGIKQR

SEQ ID NO: 35607 - protein, 882 aa, Homo sapiens
  REGION 1..882: note = ENSP00000309186
MLLGASWLCASKAAAAAAQSEGDEDRPGERRRRRAAATAAGAGEDMDESSLLDLLECSVCLERLDTTAKVLPCQHTFCRRCLESIVCSRHELRCPECRILVGCGVDELPANILLVRLLDGIRQRPRAGTSPGGSPPARPIPGQSAAPTLAGGGGGAAGSTPGSPVFLSAAAGSTAGSLRELATSRTAPAAKNPCLLPYGKALYSYEGKEPGDLKFNKGDIIVLRRKVDEQWYHGELHGTQGFLPASYIQCIQPLPHAPPQGKALYDFEMKDKDQDKDCLTFTKDEILTVLRRVDENWAEGMLGDKIGIFPLLYVELNDSAKQLIEMDKPCPAAASSCNASLPSDSGAVASVAPSPTLSSSGAVSAFQRRVDGKKNTKKRHSFTALSVTHRSSQAASHRHSMEISAPVLISSSDPRAAARIGDLAHLSCAAPTQDVSSSAGSTPTAVPRAASVSGEQGTPPKVQLPLNVYLALYAYKPQKSDELELHKGEMYRVLEKCQDGWFKGASLRTGVSGVFPGNYVTPVSRVPAGGAGPPRNNVVGGSPLAKGITTTMHPGSGSLSSLATATRPALPITTPQAHAQHPTASPPTGSCLRHSAQPTASQARSTISTAAHSAAQAQDRPTATVSPLRTQNSPSRLPATSLRPHSVVSPQHSHQPPVQMCPRPAIPLTSAASAITPPNVSAANLNGEAGGGPIGVLSTSSPTNTGCKLDEKKSEKKEKKSGLLKLLAGASTKKKSRSPPSVSPTHDPQVAVDALLQGAVGPEVSSLSIHGRAGSCPIESEMQGAMGMEPLHRKAGSLDLNFTSPSRQAPLSMAAIRPEPKLLPRERYRVVVSYPPQSEAEIELKEGDIVFVHKKREDGWYKGTLQRNGRTGLFPGSFVESF

SEQ ID NO: 35608 - protein, 1259 aa, Homo sapiens
  REGION 1..1259: note = ENSP00000425627
MGGCFCIPRERSLTRGPGKETPSKDPTVSSECIASSEYKEKCFLPQNINPDLTLSFCVKSRSRRCVNGPLQEAARRRLWALENEDQEVRMLFKDLSARLVSIQSQRAQFLITFKTMEEIWKFSTYLNLGYVSMCLEHLLFDHKYWLNCILVEDTEIQVSVDDKHLETIYLGLLIQEGHFFCRALCSVTPPAEKEGECLTLCKNELISVKMAEAGSELEGVSLVTGQRGLVLVSALEPLPLPFHQWFLKNYPGSCGLSRKRDWTGSYQIGRGRCKALTGYEPGEKDELNFYQGESIEIIGFVIPGLQWFIGKSTSSGQVGFVPTRNIDPDSYSPMSRNSAFLSDEERCSLLALGSDKQTECSSFLHTLARTDITSVYRLSGFESIQNPPNDLSASQPEGFKEVRPGRAWEEHQAVGSRQSSSSEDSSLEEELLSATSDSYRLPEPDDLDDPELLMDLSTGQEEEAENFAPILAFLDHEGYADHFKSLYDFSFSFLTSSFYSFSEEDEFVAYLEASRKWAKKSHMTWAHARLCFLLGRLSIRKVKLSQARVYFEEAIHILNGAFEDLSLVATLYINLAAIYLKQRLRHKGSALLEKAGALLACLPDRESSAKHELDVVAYVLRQGIVVGSSPLEARACFLAIRLLLSLGRHEEVLPFAERLQLLSGHPPASEAVASVLSFLYDKKYLPHLAVASVQQHGIQSAQGMSLPIWQVHLVLQNTTKLLGFPSPGWGEVSALACPMLRQALAACEELADRSTQRALCLILSKVYLEHRSPDGAIHYLSQALVLGQLLGEQESFESSLCLAWAYLLASQAKKALDVLEPLLCSLKETESLTQRGVIYNLLGLALQGEGRVNRAAKSYLRALNRAQEVGDVHNQAVAMANLGHLSLKSWAQHPARNYLLQAVRLYCELQASKETDMELVQVFLWLAQVLVSGHQLTHGLLCYEMALLFGLRHRHLKSQLQATKSLCHFYSSVSPNPEACITYHEHWLALAQQLRDREMEGRLLESLGQLYRNLNTARSLRRSLTCIKESLRIFIDLGETDKAAEAWLGAGRLHYLMQEDELVELCLQAAIQTALKSEEPLLALKLYEEAGDVFFNGTRHRHHAVEYYRAGAVPLARRLKAVRTELRIFNKLTELQISLEGYEKALEFATLAARLSTVTGDQRQELVAFHRLATVYYSLHMYEMAEDCYLKTLSLCPPWLQSPKEALYYAKVYYRLGRLTFCQLKFLLCCPGWSSVVQSGLPATSDSGAQVILQCQPPE

SEQ ID NO: 35609 - protein, 227 aa, Homo sapiens
  REGION 1..227: note = ENSP00000313025
MGGCFCIPRERSLTRGPGKETPSKDPTVSSECIASSEYKEKCFLPQNINPDLTLSFCVKSRSRRCVNGPLQEAARRRLWALENEDQEVRMLFKDLSARLVSIQSQRAQFLITFKTMEEIWKFSTYLNLGYVSMCLEHLLFDHKYWLNCILVEDTEIQVSVDDKHLETIYLGLLIQEGHFFCRALCSVTPPAEKEGECLTLCKNELISVKMAEAGSELEGVSLVTGGS

SEQ ID NO: 35610 - protein, 141 aa, Homo sapiens
  REGION 1..141: note = ENSP00000421779
CKNELISVKMAEAGSELEGVSLVTGQRGLVLVSALEPLPLPFHQWFLKNYPGSCGLSRKRDWTGSYQIGRGRCKALTGYEPGEKDELNFYQGESIEIIGFVIPGLQWFIGKSTSSGQVGFVPTRNIDPDSYSPMTWCVSSI

SEQ ID NO: 35611 - protein, 150 aa, Homo sapiens
  REGION 1..150: note = ENSP00000421092
MSEQMMQSVGCRISLSVFQFLGDQRQELVAFHRLATVYYSLHMYEMAEDCYLKTLSLCPPWLQSPKEALYYAKVYYRLGRLTFCQLKDAHDATEYFLLALAAAVLLGDEELQDTIRSRLDNICQSPLWHSRPSGCSSERARWLSGGGLAL

SEQ ID NO: 35612 - protein, 37 aa, Homo sapiens
  REGION 1..37: note = ENSP00000423940
  VARIANT 1: note = Any amino acid
XECSSFLHTLARTDITSVYRLSGFESIQNPPNDLSGE

SEQ ID NO: 35613 - protein, 1288 aa, Homo sapiens
  REGION 1..1288: note = ENSP00000423660
MGGCFCIPRERSLTRGPGKETPSKDPTVSSECIASSEYKEKCFLPQNINPDLTLSFCVKSRSRRCVNGPLQEAARRRLWALENEDQEVRMLFKDLSARLVSIQSQRAQFLITFKTMEEIWKFSTYLNLGYVSMCLEHLLFDHKYWLNCILVEDTEIQVSVDDKHLETIYLGLLIQEGHFFCRALCSVTPPAEKEGECLTLCKNELISVKMAEAGSELEGVSLVTGQRGLVLVSALEPLPLPFHQWFLKNYPGSCGLSRKRDWTGSYQIGRGRCKALTGYEPGEKDELNFYQGESIEIIGFVIPGLQWFIGKSTSSGQVGFVPTRNIDPDSYSPMSRNSAFLSDEERCSLLALGSDKQTECSSFLHTLARTDITSVYRLSGFESIQNPPNDLSASQPEGFKEVRPGRAWEEHQAVGSRQSSSSEDSSLEEELLSATSDSYRLPEPDDLDDPELLMDLSTGQEEEAENFAPILAFLDHEGYADHFKSLYDFSFSFLTSSFYSFSEEDEFVAYLEASRKWAKKSHMTWAHARLCFLLGRLSIRKVKLSQARVYFEEAIHILNGAFEDLSLVATLYINLAAIYLKQRLRHKGSALLEKAGALLACLPDRESSAKHELDVVAYVLRQGIVVGSSPLEARACFLAIRLLLSLGRHEEVLPFAERLQLLSGHPPASEAVASVLSFLYDKKYLPHLAVASVQQHGIQSAQGMSLPIWQVHLVLQNTTKLLGFPSPGWGEVSALACPMLRQALAACEELADRSTQRALCLILSKVYLEHRSPDGAIHYLSQALVLGQLLGEQESFESSLCLAWAYLLASQAKKALDVLEPLLCSLKETESLTQRGVIYNLLGLALQGEGRVNRAAKSYLRALNRAQEVGDVHNQAVAMANLGHLSLKSWAQHPARNYLLQAVRLYCELQASKETDMELVQVFLWLAQVLVSGHQLTHGLLCYEMALLFGLRHRHLKSQLQATKSLCHFYSSVSPNPEACITYHEHWLALAQQLRDREMEGRLLESLGQLYRNLNTARSLRRSLTCIKESLRIFIDLGETDKAAEAWLGAGRLHYLMQEDELVELCLQAAIQTALKSEEPLLALKLYEEAGDVFFNGTRHRHHAVEYYRAGAVPLARRLKAVRTELRIFNKLTELQISLEGYEKALEFATLAARLSTVTGDQRQELVAFHRLATVYYSLHMYEMAEDCYLKTLSLCPPWLQSPKEALYYAKVYYRLGRLTFCQLKDAHDATEYFLLALAAAVLLGDEELQDTIRSRLDNICQSPLWHSRPSGCSSERARWLSGGGLAL

SEQ ID NO: 35614 - protein, 1281 aa, Homo sapiens
  REGION 1..1281: note = ENSP00000421860
MGGCFCIPRERSLTRGPGKETPSKDPTVSSECIASSEYKEKCFLPQNINPDLTLSFCVKSRSRRCVNGPLQEAARRRLWALENEDQEVRMLFKDLSARLVSIQSQRAQFLITFKTMEEIWKFSTYLNLEHLLFDHKYWLNCILVEDTEIQVSVDDKHLETIYLGLLIQEGHFFCRALCSVTPPAEKEGECLTLCKNELISVKMAEAGSELEGVSLVTGQRGLVLVSALEPLPLPFHQWFLKNYPGSCGLSRKRDWTGSYQIGRGRCKALTGYEPGEKDELNFYQGESIEIIGFVIPGLQWFIGKSTSSGQVGFVPTRNIDPDSYSPMSRNSAFLSDEERCSLLALGSDKQTECSSFLHTLARTDITSVYRLSGFESIQNPPNDLSASQPEGFKEVRPGRAWEEHQAVGSRQSSSSEDSSLEEELLSATSDSYRLPEPDDLDDPELLMDLSTGQEEEAENFAPILAFLDHEGYADHFKSLYDFSFSFLTSSFYSFSEEDEFVAYLEASRKWAKKSHMTWAHARLCFLLGRLSIRKVKLSQARVYFEEAIHILNGAFEDLSLVATLYINLAAIYLKQRLRHKGSALLEKAGALLACLPDRESSAKHELDVVAYVLRQGIVVGSSPLEARACFLAIRLLLSLGRHEEVLPFAERLQLLSGHPPASEAVASVLSFLYDKKYLPHLAVASVQQHGIQSAQGMSLPIWQVHLVLQNTTKLLGFPSPGWGEVSALACPMLRQALAACEELADRSTQRALCLILSKVYLEHRSPDGAIHYLSQALVLGQLLGEQESFESSLCLAWAYLLASQAKKALDVLEPLLCSLKETESLTQRGVIYNLLGLALQGEGRVNRAAKSYLRALNRAQEVGDVHNQAVAMANLGHLSLKSWAQHPARNYLLQAVRLYCELQASKETDMELVQVFLWLAQVLVSGHQLTHGLLCYEMALLFGLRHRHLKSQLQATKSLCHFYSSVSPNPEACITYHEHWLALAQQLRDREMEGRLLESLGQLYRNLNTARSLRRSLTCIKESLRIFIDLGETDKAAEAWLGAGRLHYLMQEDELVELCLQAAIQTALKSEEPLLALKLYEEAGDVFFNGTRHRHHAVEYYRAGAVPLARRLKAVRTELRIFNKLTELQISLEGYEKALEFATLAARLSTVTGDQRQELVAFHRLATVYYSLHMYEMAEDCYLKTLSLCPPWLQSPKEALYYAKVYYRLGRLTFCQLKDAHDATEYFLLALAAAVLLGDEELQDTIRSRLDNICQSPLWHSRPSGCSSERARWLSGGGLAL

SEQ ID NO: 35615 - protein, 227 aa, Homo sapiens; identical to SEQ ID NO: 35609
  REGION 1..227: note = ENSP00000423111

SEQ ID NO: 35616 - protein, 95 aa, Homo sapiens
  REGION 1..95: note = ENSP00000421420
MGGCFCIPRERSLTRGPGKETPSKDPTVSSECIASSEYKEKCFLPQNINPDLTLSFCVKSRSRRCVNGPLQEAARRRLWALENEDQEVRMLFKVL

SEQ ID NO: 35617 - protein, 1548 aa, Homo sapiens
  REGION 1..1548: note = ENSP00000375689
MQLMALEQRFGSGLPGGGQPLCLMMSSPLPPPPPHFSCLPASDYIIKEKTVLLQKKDSEGFGFVLRGAKAQTPIEEFTPTPAFPALQYLESVDEGGVAWRAGLRMGDFLIEVNGQNVVKVGHRQVVNMIRQGGNTLMVKVVMVTRHPDMDEAVHKKAPQQAKRLPPPTISLRSKSMTSELEEMEYEQQPAPVPSMEKKRTVYQMALNKLDEILAAAQQTISASESPGPGGLASLGKHRPKGFFATESSFDPHHRAQPSYERPSFLPPGPGLMLRQKSIGAAEDDRPYLAPPAMKFSRSLSVPGSEDIPPPPTTSPPEPPYSTPPVPSSSGRLTPSPRGGPFNPGSGGPLPASSPASFDGPSPPDTRVGSREKSLYHSGPLPPAHHHPPHHHHHHAPPPQPHHHHAHPPHPPEMETGGSPDDPPPRLALGPQPSLRGWRGGGPSPTPGAPSPSHHGSAGGGGGSSQGPALRYFQLPPRAASAAMYVPARSGRGRKGPLVKQTKVEGEPQKGGGLPPAPSPTSPASPQPPPAVAAPSEKNSIPIPTIIIKAPSTSSSGRSSQGSSTEAEPPTQPEPTGGGGGGGSSPSPAPAMSPVPPSPSPVPTPASPSGPATLDFTSQFGAALVGAARREGGWQNEARRRSTLFLSTDAGDEDGGDGGLGTGAAPGPRLRHSKSIDEGMFSAEPYLRLESAGSGAGYGGYGAGSRAYGGGGGSSAFTSFLPPRPLVHPLTGKALDPASPLGLALAARERALKESSEGGGAPQPPPRPPSPRYEAPPPTPHHHSPHAHHEPVLRLWGASPPDPARRELGYRAGLGSQEKSLPASPPAARRSLLHRLPPTAPGVGPLLLQLGTEPPAPHPGVSKPWRSAAPEEPERLPLHVRFLENCQPRAPVTSGRGPPSEDGPGVPPPSPRRSVPPSPTSPRASEENGLPLLVLPPPAPSVDVEDGEFLFVEPLPPPLEFSNSFEKPESPLTPGPPHPLPDTPAPATPLPPVPPPAVAAAPPTLDSTASSLTSYDSEVATLTQGASAAPGDPHPPGPPAPAAPAPAAPQPGPDPPPGTDSGIEEVDSRSSSDHPLETISSASTLSSLSAEGGGSAGGGGGAGAGVASGPELLDTYVAYLDGQAFGGSSTPGPPYPPQLMTPSKLRGRALGASGGLRPGPSGGLRDPVTPTSPTVSVTGAGTDGLLALRACSGPPTAGVAGGPVAVEPEVPPVPLPTASSLPRKLLPWEEGPGPPPPPLPGPLAQPQASALATVKASIISELSSKLQQFGGSSAAGGALPWARGGSGGGGDSHHGGASYVPERTSSLQRQRLSDDSQSSLLSKPVSSLFQNWPKPPLPPLPTGTGVSPTAAAAPGATSPSASSSSTSTRHLQGVEFEMRPPLLRRAPSPSLLPASEHKVSPAPRPSSLPILPSGPLYPGLFDIRGSPTGGAGGSADPFAPVFVPPHPGISGGLGGALSGASRSLSPTRLLSLPPDKPFGAKPLGFWTKFDVADWLEWLGLAEHRAQFLDHEIDGSHLPALTKEDYVDLGVTRVGHRMNIDRALKFFLER

SEQ ID NO: 35618 - protein, 2161 aa, Homo sapiens
  REGION 1..2161: note = ENSP00000293441
MTHSPATSEDEERHSASECPEGGSESDSSPDGPGRGPRGTRGQGSGAPGSLASVRGLQGRSMSVPDDAHFSMMVFRIGIPDLHQTKCLRFNPDATIWTAKQQVLCALSESLQDVLNYGLFQPATSGRDANFLEEERLLREYPQSFEKGVPYLEFRYKTRVYKQTNLDEKQLAKLHTKTGLKKFLEYVQLGTSDKVARLLDKGLDPNYHDSDSGETPLTLAAQTEGSVEVIRTLCLGGAHIDFRARDGMTALHKAACARHCLALTALLDLGGSPNYKDRRGLTPLFHTAMVGGDPRCCELLLFNRAQLGIADENGWQEIHQACQRGHSQHLEHLLFYGAEPGAQNASGNTALHICALYNKETCARILLYRGADKDVKNNNGQTPFQVAVIAGNFELGELIRNHREQDVVPFQESPKYAARRRGPPGTGLTVPPALLRANSDTSMALPDWMVFSAPGAASSGAPGPTSGSQGQSQPSAPTTKLSSGTLRSASSPRGARARSPSRGRHPEDAKRQPRGRPSSSGTPREGPAGGTGGSGGPGGSLGSRGRRRKLYSAVPGRSFMAVKSYQAQAEGEISLSKGEKIKVLSIGEGGFWEGQVKGRVGWFPSDCLEEVANRSQESKQESRSDKAKRLFRHYTVGSYDSFDAPSLMDGIGPGSDYIIKEKTVLLQKKDSEGFGFVLRGAKAQTPIEEFTPTPAFPALQYLESVDEGGVAWRAGLRMGDFLIEVNGQNVVKVGHRQVVNMIRQGGNTLMVKVVMVTRHPDMDEAVHKKAPQQAKRLPPPTISLRSKSMTSELEEMEYEQQPAPVPSMEKKRTVYQMALNKLDEILAAAQQTISASESPGPGGLASLGKHRPKGFFATESSFDPHHRAQPSYERPSFLPPGPGLMLRQKSIGAAEDDRPYLAPPAMKFSRSLSVPGSEDIPPPPTTSPPEPPYSTPPVPSSSGRLTPSPRGGPFNPGSGGPLPASSPASFDGPSPPDTRVGSREKSLYHSGPLPPAHHHPPHHHHHHAPPPQPHHHHAHPPHPPEMETGGSPDDPPPRLALGPQPSLRGWRGGGPSPTPGAPSPSHHGSAGGGGGSSQGPALRYFQLPPRAASAAMYVPARSGRGRKGPLVKQTKVEGEPQKGGGLPPAPSPTSPASPQPPPAVAAPSEKNSIPIPTIIIKAPSTSSSGRSSQGSSTEAEPPTQPEPTGGGGGGGSSPSPAPAMSPVPPSPSPVPTPASPSGPATLDFTSQFGAALVGAARREGGWQNEARRRSTLFLSTDAGDEDGGDGGLGTGAAPGPRLRHSKSIDEGMFSAEPYLRLESAGSGAGYGGYGAGSRAYGGGGGSSAFTSFLPPRPLVHPLTGKALDPASPLGLALAARERALKESSEGGGAPQPPPRPPSPRYEAPPPTPHHHSPHAHHEPVLRLWGASPPDPARRELGYRAGLGSQEKSLPASPPAARRSLLHRLPPTAPGVGPLLLQLGTEPPAPHPGVSKPWRSAAPEEPERLPLHVRFLENCQPRAPVTSGRGPPSEDGPGVPPPSPRRSVPPSPTSPRASEENGLPLLVLPPPAPSVDVEDGEFLFVEPLPPPLEFSNSFEKPESPLTPGPPHPLPDTPAPATPLPPVPPPAVAAAPPTLDSTASSLTSYDSEVATLTQGASAAPGDPHPPGPPAPAAPAPAAPQPGPDPPPGTDSGIEEVDSRSSSDHPLETISSASTLSSLSAEGGGSAGGGGGAGAGVASGPELLDTYVAYLDGQAFGGSSTPGPPYPPQLMTPSKLRGRALGASGGLRPGPSGGLRDPVTPTSPTVSVTGAGTDGLLALRACSGPPTAGVAGGPVAVEPEVPPVPLPTASSLPRKLLPWEEGPGPPPPPLPGPLAQPQASALATVKASIISELSSKLQQFGGSSAAGGALPWARGGSGGGGDSHHGGASYVPERTSSLQRQRLSDDSQSSLLSKPVSSLFQNWPKPPLPPLPTGTGVSPTAAAAPGATSPSASSSSTSTRHLQGVEFEMRPPLLRRAPSPSLLPASEHKVSPAPRPSSLPILPSGPLYPGLFDIRGSPTGGAGGSADPFAPVFVPPHPGISGGLGGALSGASRSLSPTRLLSLPPDKPFGAKPLGFWTKFDVADWLEWLGLAEHRAQFLDHEIDGSHLPALTKEDYVDLGVTRVGHRMNIDRALKFFLER

SEQ ID NO: 35619 - protein, 2169 aa, Homo sapiens
  REGION 1..2169: note = ENSP00000375690
MTHSPATSEDEERHSASECPEGGSESDSSPDGPGRGPRGTRGQGSGAPGSLASVRGLQGRSMSVPDDAHFSMMVFRIGIPDLHQTKCLRFNPDATIWTAKQQVLCALSESLQDVLNYGLFQPATSGRDANFLEEERLLREYPQSFEKGVPYLEFRYKTRVYKQTNLDEKQLAKLHTKTGLKKFLEYVQLGTSDKVARLLDKGLDPNYHDSDSGETPLTLAAQTEGSVEVIRTLCLGGAHIDFRARDGMTALHKAACARHCLALTALLDLGGSPNYKDRRGLTPLFHTAMVGGDPRCCELLLFNRAQLGIADENGWQEIHQACQRGHSQHLEHLLFYGAEPGAQNASGNTALHICALYNKETCARILLYRGADKDVKNNNGQTPFQVAVIAGNFELGELIRNHREQDVVPFQESPKYAARRRGPPGTGLTVPPALLRANSDTSMALPDWMVFSAPGAASSGAPGPTSGSQGQSQPSAPTTKLSSGTLRSASSPRGARARSPSRGRHPEDAKRQPRGRPSSSGTPREGPAGGTGGSGGPGGSLGSRGRRRKLYSAVPGRSFMAVKSYQAQAEGEISLSKGEKIKVLSIGEGGFWEGQVKGRVGWFPSDCLEEVANRSQESKQESRSDKAKRLFRHYTVGSYDSFDAPSLMDGIGPGSDYIIKEKTVLLQKKDSEGFGFVLRGAKAQTPIEEFTPTPAFPALQYLESVDEGGVAWRAGLRMGDFLIEVNGQNVVKVGHRQVVNMIRQGGNTLMVKVVMVTRHPDMDEAVHKKAPQQAKRLPPPTISLRSKSMTSELEEMVSPWKKKSEYEQQPAPVPSMEKKRTVYQMALNKLDEILAAAQQTISASESPGPGGLASLGKHRPKGFFATESSFDPHHRAQPSYERPSFLPPGPGLMLRQKSIGAAEDDRPYLAPPAMKFSRSLSVPGSEDIPPPPTTSPPEPPYSTPPVPSSSGRLTPSPRGGPFNPGSGGPLPASSPASFDGPSPPDTRVGSREKSLYHSGPLPPAHHHPPHHHHHHAPPPQPHHHHAHPPHPPEMETGGSPDDPPPRLALGPQPSLRGWRGGGPSPTPGAPSPSHHGSAGGGGGSSQGPALRYFQLPPRAASAAMYVPARSGRGRKGPLVKQTKVEGEPQKGGGLPPAPSPTSPASPQPPPAVAAPSEKNSIPIPTIIIKAPSTSSSGRSSQGSSTEAEPPTQPEPTGGGGGGGSSPSPAPAMSPVPPSPSPVPTPASPSGPATLDFTSQFGAALVGAARREGGWQNEARRRSTLFLSTDAGDEDGGDGGLGTGAAPGPRLRHSKSIDEGMFSAEPYLRLESAGSGAGYGGYGAGSRAYGGGGGSSAFTSFLPPRPLVHPLTGKALDPASPLGLALAARERALKESSEGGGAPQPPPRPPSPRYEAPPPTPHHHSPHAHHEPVLRLWGASPPDPARRELGYRAGLGSQEKSLPASPPAARRSLLHRLPPTAPGVGPLLLQLGTEPPAPHPGVSKPWRSAAPEEPERLPLHVRFLENCQPRAPVTSGRGPPSEDGPGVPPPSPRRSVPPSPTSPRASEENGLPLLVLPPPAPSVDVEDGEFLFVEPLPPPLEFSNSFEKPESPLTPGPPHPLPDTPAPATPLPPVPPPAVAAAPPTLDSTASSLTSYDSEVATLTQGASAAPGDPHPPGPPAPAAPAPAAPQPGPDPPPGTDSGIEEVDSRSSSDHPLETISSASTLSSLSAEGGGSAGGGGGAGAGVASGPELLDTYVAYLDGQAFGGSSTPGPPYPPQLMTPSKLRGRALGASGGLRPGPSGGLRDPVTPTSPTVSVTGAGTDGLLALRACSGPPTAGVAGGPVAVEPEVPPVPLPTASSLPRKLLPWEEGPGPPPPPLPGPLAQPQASALATVKASIISELSSKLQQFGGSSAAGGALPWARGGSGGGGDSHHGGASYVPERTSSLQRQRLSDDSQSSLLSKPVSSLFQNWPKPPLPPLPTGTGVSPTAAAAPGATSPSASSSSTSTRHLQGVEFEMRPPLLRRAPSPSLLPASEHKVSPAPRPSSLPILPSGPLYPGLFDIRGSPTGGAGGSADPFAPVFVPPHPGISGGLGGALSGASRSLSPTRLLSLPPDKPFGAKPLGFWTKFDVADWLEWLGLAEHRAQFLDHEIDGSHLPALTKEDYVDLGVTRVGHRMNIDRALKFFLER

SEQ ID NO: 35620 - protein, 2152 aa, Homo sapiens
  REGION 1..2152: note = ENSP00000351984
MTHSPATSEDEERHSASECPEGGSESDSSPDGPGRGPRGTRGQGSGAPGSLASVRGLQGRSMSVPDDAHFSMMVFRIGIPDLHQTKCLRFNPDATIWTAKQQVLCALSESLQDVLNYGLFQPATSGRDANFLEEERLLREYPQSFEKGVPYLEFRYKTRVYKQTNLDEKQLAKLHTKTGLKKFLEYVQLGTSDKVARLLDKGLDPNYHDSDSGETPLTLAAQTEGSVEVIRTLCLGGAHIDFRARDGMTALHKAACARHCLALTALLDLGGSPNYKDRRGLTPLFHTAMVGGDPRCCELLLFNRAQLGIADENGWQEIHQACQRGHSQHLEHLLFYGAEPGAQNASGNTALHICALYNKETCARILLYRGADKDVKNNNGQTPFQVAVIAGNFELGELIRNHREQDVVPFQESPKYAARRRGPPGTGLTVPPALLRANSDTSMALPDWMVFSAPGAASSGAPGPTSGSQGQSQPSAPTTKLSSGTLRSASSPRGARARSPSRGRHPEDAKRQPRGRPSSSGTPREGPAGGTGGSGGPGGSLGSRGRRRKLYSAVPGRSFMAVKSYQAQAEGEISLSKGEKIKVLSIGEGGFWEGQVKGRVGWFPSDCLEEVANRSQESKQESRSDKAKRLFRHYTVGSYDSFDAPSDYIIKEKTVLLQKKDSEGFGFVLRGAKAQTPIEEFTPTPAFPALQYLESVDEGGVAWRAGLRMGDFLIEVNGQNVVKVGHRQVVNMIRQGGNTLMVKVVMVTRHPDMDEAVHKKAPQQAKRLPPPTISLRSKSMTSELEEMEYEQQPAPVPSMEKKRTVYQMALNKLDEILAAAQQTISASESPGPGGLASLGKHRPKGFFATESSFDPHHRAQPSYERPSFLPPGPGLMLRQKSIGAAEDDRPYLAPPAMKFSRSLSVPGSEDIPPPPTTSPPEPPYSTPPVPSSSGRLTPSPRGGPFNPGSGGPLPASSPASFDGPSPPDTRVGSREKSLYHSGPLPPAHHHPPHHHHHHAPPPQPHHHHAHPPHPPEMETGGSPDDPPPRLALGPQPSLRGWRGGGPSPTPGAPSPSHHGSAGGGGGSSQGPALRYFQLPPRAASAAMYVPARSGRGRKGPLVKQTKVEGEPQKGGGLPPAPSPTSPASPQPPPAVAAPSEKNSIPIPTIIIKAPSTSSSGRSSQGSSTEAEPPTQPEPTGGGGGGGSSPSPAPAMSPVPPSPSPVPTPASPSGPATLDFTSQFGAALVGAARREGGWQNEARRRSTLFLSTDAGDEDGGDGGLGTGAAPGPRLRHSKSIDEGMFSAEPYLRLESAGSGAGYGGYGAGSRAYGGGGGSSAFTSFLPPRPLVHPLTGKALDPASPLGLALAARERALKESSEGGGAPQPPPRPPSPRYEAPPPTPHHHSPHAHHEPVLRLWGASPPDPARRELGYRAGLGSQEKSLPASPPAARRSLLHRLPPTAPGVGPLLLQLGTEPPAPHPGVSKPWRSAAPEEPERLPLHVRFLENCQPRAPVTSGRGPPSEDGPGVPPPSPRRSVPPSPTSPRASEENGLPLLVLPPPAPSVDVEDGEFLFVEPLPPPLEFSNSFEKPESPLTPGPPHPLPDTPAPATPLPPVPPPAVAAAPPTLDSTASSLTSYDSEVATLTQGASAAPGDPHPPGPPAPAAPAPAAPQPGPDPPPGTDSGIEEVDSRSSSDHPLETISSASTLSSLSAEGGGSAGGGGGAGAGVASGPELLDTYVAYLDGQAFGGSSTPGPPYPPQLMTPSKLRGRALGASGGLRPGPSGGLRDPVTPTSPTVSVTGAGTDGLLALRACSGPPTAGVAGGPVAVEPEVPPVPLPTASSLPRKLLPWEEGPGPPPPPLPGPLAQPQASALATVKASIISELSSKLQQFGGSSAAGGALPWARGGSGGGGDSHHGGASYVPERTSSLQRQRLSDDSQSSLLSKPVSSLFQNWPKPPLPPLPTGTGVSPTAAAAPGATSPSASSSSTSTRHLQGVEFEMRPPLLRRAPSPSLLPASEHKVSPAPRPSSLPILPSGPLYPGLFDIRGSPTGGAGGSADPFAPVFVPPHPGISGGLGGALSGASRSLSPTRLLSLPPDKPFGAKPLGFWTKFDVADWLEWLGLAEHRAQFLDHEIDGSHLPALTKEDYVDLGVTRVGHRMNIDRALKFFLER

SEQ ID NO: 35621 - protein, 183 aa, Homo sapiens
  REGION 1..183: note = ENSP00000469719
PGPPYPPQLMTPSKLRGRALGASGGLRPGPSGGLRDPVTPTSPTVSVTGAGTDGLLALRACSGPPTAGVAGGPVAVEPEVPPVPLPTASSLPRKLLPWEEGPGPPPPPLPGPLAQPQASALATVKASIISELSSKLQQFGGSSAAGGALPWARGGSGGGGDSHHGGASYVPERTSSLQRQSIE

SEQ ID NO: 35622 - protein, 126 aa, Homo sapiens
  REGION 1..126: note = ENSP00000476264
MPRSPTSSEDEMAQSFSDYSVGSESDSSKEETIYDTIRATAEKPGGARTEESQGNTLVIRVVIHDLQQTKCIRFNPDATVWVAKQRILCTLTQSLKDVLNYGLFQPASNGRDGRSFPGVSIQEAGV

SEQ ID NO: 35623 - protein, 108 aa, Homo sapiens
  REGION 1..108: note = ENSP00000482553
  VARIANT 1: note = Any amino acid
XEHATVCCKDENGWHEIHQACRYGHVQHLEHLLFYGADMSAQNASGNTALHICALYNQDSCARVLLFRGGNKELKNYNSQTPFQVAIIAGNFELAEYIKNHKETDIGE

SEQ ID NO: 35624 - protein, 186 aa, Homo sapiens
  REGION 1..186: note = ENSP00000392674
  VARIANT 1: note = Any amino acid
XFYKLQGPSCRFHLPEGRHPGGRGTRMDVGTTSALPFSQCPSERPRRTPTAGGGPPTRWPPPGSCCAPTVTTTSMPALPTGPSAPRPPRTAACHPSCCSRCPASPRGPRRPLGATCPGPAAGPHRSTGWAAQARTARGRSLSGMSGRLLLLVPTRTHSRPSSTRGPSGSSTVPCPGGSSSLSSHTN

SEQ ID NO: 35625 - protein, 74 aa, Homo sapiens
  REGION 1..74: note = ENSP00000483920
  VARIANT 1: note = Any amino acid
XAGFESSPSTCSWFPADRQNMGWALSPARWVWHAQLCSEVHRAQTPATSPRVPAALAPRGRAARLSFLPSRKVI

SEQ ID NO: 35626 - protein, 281 aa, Homo sapiens
  REGION 1..281: note = ENSP00000387324
MMMNVPGGGAAAVMMTGYNNGRCPRNSLYSDCIIEEKTVVLQKKDNEGFGFVLRGAKADTPIEEFTPTPAFPALQYLESVDEGGVAWQAGLRTGDFLIEVNNENVVKVGHRQVVNMIRQGGNHLVLKVVTVTRNLDPDDTARKKAPPPPKRAPTTALTLRSKSMTSELEELVDKASVRKKKDKPEEIVPASKPSRAAENMAVEPRVATIKQRPSSRCFPAGSDMNSVYERQGIAVMTPTVPGSPKAPFLGIPRGTMRRQKSIGKKCGTPPQKLPLGFQTQP

SEQ ID NO: 35627 - protein, 257 aa, Homo sapiens
  REGION 1..257: note = ENSP00000414876
  VARIANT 1: note = Any amino acid
XMNVPGGGAAAVMMTGYNNGRCPRNSLYSDCIIEEKTVVLQKKDNEGFGFVLRGAKADTPIEEFTPTPAFPALQYLESVDEGGVAWQAGLRTGDFLIEVNNENVVKVGHRQVVNMIRQGGNHLVLKVVTVTRNLDPDDTARKKAPPPPKRAPTTALTLRSKSMTSELEELVDKASVRKKKDKPEEIVPASKPSRAAENMAVEPRVATIKQRPSSRCFPAGSDMNSVYERQGIAVMTPTVPGSPKAPFLGIPREARRS

SEQ ID NO: 35628 - protein, 1261 aa, Homo sapiens [sequence omitted]

SEQ ID NO: 35629 - protein, 244 aa, Homo sapiens [sequence omitted]

SEQ ID NO: 35630 - protein, 212 aa, Homo sapiens
  REGION 1..212: note = ENSP00000390636
  VARIANT 1: note = Any amino acid
XTPLTLAAQLDDSVEVIKALKNGGAHLDFRAKDGMTALHKAARARNQVALKTLLELGASPDYKDSYGLTPLYHTAIVGGDPYCCELLLHEHATVCCKDENGWHEIHQACRYGHVQHLEHLLFYGADMSAQNASGNTALHICALYNQDSCARVLLFRGGNKELKNYNSQTPFQPQKAATRDHRWVSVPTLLLLRPPRTHEARAALPSASPRVL

SEQ ID NO: 35631 - protein, 153 aa, Homo sapiens
  REGION 1..153: note = ENSP00000391570
  VARIANT 1: note = Any amino acid
XTETRADRSKKLFRHYTVGSYDSFDTSSDCIIEEKTVVLQKKDNEGFGFVLRGAKADTPIEEFTPTPAFPALQYLESVDEGGVAWQAGLRTGDFLIEVNNENVVKVGHRQVVNMIRQGGNHLVLKVVTVTRNLDPDDTARKKDKPEEIVPASK

SEQ ID NO: 35632 - protein, 271 aa, Homo sapiens
  REGION 1..271: note = ENSP00000394939
MMMNVPGGGAAAVMMTGYNNGRCPRNSLYSDCIIEEKTVVLQKKDNEGFGFVLRGAKADTPIEEFTPTPAFPALQYLESVDEGGVAWQAGLRTGDFLIEVNNENVVKVGHRQVVNMIRQGGNHLVLKVVTVTRNLDPDDTARKKAPPPPKRAPTTALTLRSKSMTSELEELDKPEEIVPASKPSRAAENMAVEPRVATIKQRPSSRCFPAGSDMNSVYERQGIAVMTPTVPGSPKAPFLGIPRGTMRRQKSIGKKCGTPPQKLPLGFQTQP

SEQ ID NO: 35633 - protein, 1849 aa, Homo sapiens
  REGION 1..1849: note = ENSP00000469689
MPRSPTSSEDEMAQSFSDYSVGSESDSSKEETIYDTIRATAEKPGGARTEESQGNTLVIRVVIHDLQQTKCIRFNPDATVWVAKQRILCTLTQSLKDVLNYGLFQPASNGRDGKFLDEERLLREYPQPVGEGVPSLEFRYKKRVYKQASLDEKQLAKLHTKTNLKKCMDHIQHRLVEKITKMLDRGLDPNFHDPETGETPLTLAAQLDDSVEVIKALKNGGAHLDFRAKDGMTALHKAARARNQVALKTLLELGASPDYKDSYGLTPLYHTAIVGGDPYCCELLLHEHATVCCKDENGWHEIHQACRYGHVQHLEHLLFYGADMSAQNASGNTALHICALYNQDSCARVLLFRGGNKELKNYNSQTPFQVAIIAGNFELAEYIKNHKETDIVPFREAPAYSNRRRRPPNTLAAPRVLLRSNSDNNLNASAPDWAVCSTATSHRSLSPQLLQQMPSKPEGAAKTIGSYVPGPRSRSPSLNRLGGAGEDGKRPQPLWHVGSPFALGANKDSLSAFEYPGPKRKLYSAVPGRLFVAVKPYQPQVDGEIPLHRGDRVKVLSIGEGGFWEGSARGHIGWFPAECVEEVQCKPRDSQAETRADRSKKLFRHYTVGSYDSFDTSSDCIIEEKTVVLQKKDNEGFGFVLRGAKADTPIEEFTPTPAFPALQYLESVDEGGVAWQAGLRTGDFLIEVNNENVVKVGHRQVVNMIRQGGNHLVLKVVTVTRNLDPDDTARKKAPPPPKRAPTTALTLRSKSMTSELEELVDKASVRKKKDKPEEIVPASKPSRAAENMAVEPRVATIKQRPSSRCFPAGSDMNSVYERQGIAVMTPTVPGSPKAPFLGIPRGTMRRQKSIDSRIFLSGITEEERQFLAPPMLKFTRSLSMPDTSEDIPPPPQSVPPSPPPPSPTTYNCPKSPTPRVYGTIKPAFNQNSAAKVSPATRSDTVATMMREKGMYFRRELDRYSLDSEDLYSRNAGPQANFRNKRGQMPENPYSEVGKIASKAVYVPAKPARRKGMLVKQSNVEDSPEKTCSIPIPTIIVKEPSTSSSGKSSQGSSMEIDPQAPEPPSQLRPDESLTVSSPFAAAIAGAVRDREKRLEARRNSPAFLSTDLGDEDVGLGPPAPRTRPSMFPEEGDFADEDSAEQLSSPMPSATPREPENHFVGGAEASAPGEAGRPLNSTSKAQGPESSPAVPSASSGTAGPGNYVHPLTGRLLDPSSPLALALSARDRAMKESQQGPKGEAPKADLNKPLYIDTKMRPSLDAGFPTVTRQNTRGPLRRQETENKYETDLGRDRKGDDKKNMLIDIMDTSQQKSAGLLMVHTVDATKLDNALQEEDEKAEVEMKPDSSPSEVPEGVSETEGALQISAAPEPTTVPGRTIVAVGSMEEAVILPFRIPPPPLASVDLDEDFIFTEPLPPPLEFANSFDIPDDRAASVPALSDLVKQKKSDTPQSPSLNSSQPTNSADSKKPASLSNCLPASFLPPPESFDAVADSGIEEVDSRSSSDHHLETTSTISTVSSISTLSSEGGENVDTCTVYADGQAFMVDKPPVPPKPKMKPIIHKSNALYQDALVEEDVDSFVIPPPAPPPPPGSAQPGMAKVLQPRTSKLWGDVTEIKSPILSGPKANVISELNSILQQMNREKLAKPGEGLDSPMGAKSASLAPRSPEIMSTISGTRSTTVTFTVRPGTSQPITLQSRPPDYESRTSGTRRAPSPVVSPTEMNKETLPAPLSAATASPSPALSDVFSLPSQPPSGDLFGLNPAGRSRSPSPSILQQPISNKPFTTKPVHLWTKPDVADWLESLNLGEHKEAFMDNEIDGSHLPNLQKEDLIDLGVTRVGHRMNIERALKQLLDR

SEQ ID NO: 35634 - protein, 1261 aa, Homo sapiens
  REGION 1..1261: note = ENSP00000345193
MMMNVPGGGAAAVMMTGYNNGRCPRNSLYSDCIIEEKTVVLQKKDNEGFGFVLRGAKADTPIEEFTPTPAFPALQYLESVDEGGVAWQAGLRTGDFLIEVNNENVVKVGHRQVVNMIRQGGNHLVLKVVTVTRNLDPDDTARKKAPPPPKRAPTTALTLRSKSMTSELEELVDKASVRKKKDKPEEIVPASKPSRAAENMAVEPRVATIKQRPSSRCFPAGSDMNSVYERQGIAVMTPTVPGSPKAPFLGIPRGTMRRQKSIDSRIFLSGITEEERQFLAPPMLKFTRSLSMPDTSEDIPPPPQSVPPSPPPPSPTTYNCPKSPTPRVYGTIKPAFNQNSAAKVSPATRSDTVATMMREKGMYFRRELDRYSLDSEDLYSRNAGPQANFRNKRGQMPENPYSEVGKIASKAVYVPAKPARRKGMLVKQSNVEDSPEKTCSIPIPTIIVKEPSTSSSGKSSQGSSMEIDPQAPEPPSQLRPDESLTVSSPFAAAIAGAVRDREKRLEARRNSPAFLSTDLGDEDVGLGPPAPRTRPSMFPEEGDFADEDSAEQLSSPMPSATPREPENHFVGGAEASAPGEAGRPLNSTSKAQGPESSPAVPSASSGTAGPGNYVHPLTGRLLDPSSPLALALSARDRAMKESQQGPKGEAPKADLNKPLYIDTKMRPSLDAGFPTVTRQNTRGPLRRQETENKYETDLGRDRKGDDKKNMLIDIMDTSQQKSAGLLMVHTVDATKLDNALQEEDEKAEVEMKPDSSPSEVPEGVSETEGALQISAAPEPTTVPGRTIVAVGSMEEAVILPFRIPPPPLASVDLDEDFIFTEPLPPPLEFANSFDIPDDRAASVPALSDLVKQKKSDTPQSPSLNSSQPTNSADSKKPASLSNCLPASFLPPPESFDAVADSGIEEVDSRSSSDHHLETTSTISTVSSISTLSSEGGENVDTCTVYADGQAFMVDKPPVPPKPKMKPIIHKSNALYQDALVEEDVDSFVIPPPAPPPPPGSAQPGMAKVLQPRTSKLWGDVTEIKSPILSGPKANVISELNSILQQMNREKLAKPGEGLDSPMGAKSASLAPRSPEIMSTISGTRSTTVTFTVRPGTSQPITLQSRPPDYESRTSGTRRAPSPVVSPTEMNKETLPAPLSAATASPSPALSDVFSLPSQPPSGDLFGLNPAGRSRSPSPSILQQPISNKPFTTKPVHLWTKPDVADWLESLNLGEHKEAFMDNEIDGSHLPNLQKEDLIDLGVTRVGHRMNIERALKQLLDR

SEQ ID NO: 35635 - protein, 1128 aa, Homo sapiens
  REGION 1..1128: note = ENSP00000402944
LVLKVVTVTRNLDPDDTARKKAPPPPKRAPTTALTLRSKSMTSELEELDKPEEIVPASKPSRAAENMAVEPRVATIKQRPSSRCFPAGSDMNSVYERQGIAVMTPTVPGSPKAPFLGIPRGTMRRQKSIDSRIFLSGITEEERQFLAPPMLKFTRSLSMPDTSEDIPPPPQSVPPSPPPPSPTTYNCPKSPTPRVYGTIKPAFNQNSAAKVSPATRSDTVATMMREKGMYFRRELDRYSLDSEDLYSRNAGPQANFRNKRGQMPENPYSEVGKIASKAVYVPAKPARRKGMLVKQSNVEDSPEKTCSIPIPTIIVKEPSTSSSGKSSQGSSMEIDPQAPEPPSQLRPDESLTVSSPFAAAIAGAVRDREKRLEARRNSPAFLSTDLGDEDVGLGPPAPRTRPSMFPEEGDFADEDSAEQLSSPMPSATPREPENHFVGGAEASAPGEAGRPLNSTSKAQGPESSPAVPSASSGTAGPGNYVHPLTGRLLDPSSPLALALSARDRAMKESQQGPKGEAPKADLNKPLYIDTKMRPSLDAGFPTVTRQNTRGPLRRQETENKYETDLGRDRKGDDKKNMLIDIMDTSQQKSAGLLMVHTVDATKLDNALQEEDEKAEVEMKPDSSPSEVPEGVSETEGALQISAAPEPTTVPGRTIVAVGSMEEAVILPFRIPPPPLASVDLDEDFIFTEPLPPPLEFANSFDIPDDRAASVPALSDLVKQKKSDTPQSPSLNSSQPTNSADSKKPASLSNCLPASFLPPPESFDAVADSGIEEVDSRSSSDHHLETTSTISTVSSISTLSSEGGENVDTCTVYADGQAFMVDKPPVPPKPKMKPIIHKSNALYQDALVEEDVDSFVIPPPAPPPPPGSAQPGMAKVLQPRTSKLWGDVTEIKSPILSGPKANVISELNSILQQMNREKLAKPGEGLDSPMGAKSASLAPRSPEIMSTISGTRSTTVTFTVRPGTSQPITLQSRPPDYESRTSGTRRAPSPVVSPTEMNKETLPAPLSAATASPSPALSDVFSLPSQPPSGDLFGLNPAGRSRSPSPSILQQPISNKPFTTKPVHLWTKPDVADWLESLNLGEHKEAFMDNEIDGSHLPNLQKEDLIDLGVTRVGHRMNIERALKQLLDR

SEQ ID NO: 35636 - protein, 1253 aa, Homo sapiens
  REGION 1..1253: note = ENSP00000386491
MMNVPGGGAAAVMMTGYNNGRCPRNSLYSDCIIEEKTVVLQKKDNEGFGFVLRGAKADTPIEEFTPTPAFPALQYLESVDEGGVAWQAGLRTGDFLIEVNNENVVKVGHRQVVNMIRQGGNHLVLKVVTVTRNLDPDDTARKKAPPPPKRAPTTALTLRSKSMTSELEELVDKDKPEEIVPASKPSRAAENMAVEPRVATIKQRPSSRCFPAGSDMNSVYERQGIAVMTPTVPGSPKAPFLGIPRGTMRRQKSIDSRIFLSGITEEERQFLAPPMLKFTRSLSMPDTSEDIPPPPQSVPPSPPPPSPTTYNCPKSPTPRVYGTIKPAFNQNSAAKVSPATRSDTVATMMREKGMYFRRELDRYSLDSEDLYSRNAGPQANFRNKRGQMPENPYSEVGKIASKAVYVPAKPARRKGMLVKQSNVEDSPEKTCSIPIPTIIVKEPSTSSSGKSSQGSSMEIDPQAPEPPSQLRPDESLTVSSPFAAAIAGAVRDREKRLEARRNSPAFLSTDLGDEDVGLGPPAPRTRPSMFPEEGDFADEDSAEQLSSPMPSATPREPENHFVGGAEASAPGEAGRPLNSTSKAQGPESSPAVPSASSGTAGPGNYVHPLTGRLLDPSSPLALALSARDRAMKESQQGPKGEAPKADLNKPLYIDTKMRPSLDAGFPTVTRQNTRGPLRRQETENKYETDLGRDRKGDDKKNMLIDIMDTSQQKSAGLLMVHTVDATKLDNALQEEDEKAEVEMKPDSSPSEVPEGVSETEGALQISAAPEPTTVPGRTIVAVGSMEEAVILPFRIPPPPLASVDLDEDFIFTEPLPPPLEFANSFDIPDDRAASVPALSDLVKQKKSDTPQSPSLNSSQPTNSADSKKPASLSNCLPASFLPPPESFDAVADSGIEEVDSRSSSDHHLETTSTISTVSSISTLSSEGGENVDTCTVYADGQAFMVDKPPVPPKPKMKPIIHKSNALYQDALVEEDVDSFVIPPPAPPPPPGSAQPGMAKVLQPRTSKLWGDVTEIKSPILSGPKANVISELNSILQQMNREKLAKPGEGLDSPMGAKSASLAPRSPEIMSTISGTRSTTVTFTVRPGTSQPITLQSRPPDYESRTSGTRRAPSPVVSPTEMNKETLPAPLSAATASPSPALSDVFSLPSQPPSGDLFGLNPAGRSRSPSPSILQQPISNKPFTTKPVHLWTKPDVADWLESLNLGEHKEAFMDNEIDGSHLPNLQKEDLIDLGVTRVGHRMNIERALKQLLDR

SEQ ID NO: 35637 - protein, 1724 aa, Homo sapiens
  REGION 1..1724: note = ENSP00000489407
MDGPGASAVVVRVGIPDLQQTKCLRLDPAAPVWAAKQRVLCALNHSLQDALNYGLFQPPSRGRAGKFLDEERLLQEYPPNLDTPLPYLEFRYKRRVYAQNLIDDKQFAKLHTKANLKKFMDYVQLHSTDKVARLLDKGLDPNFHDPDSGECPLSLAAQLDNATDLLKVLKNGGAHLDFRTRDGLTAVHCATRQRNAAALTTLLDLGASPDYKDSRGLTPLYHSALGGGDALCCELLLHDHAQLGITDENGWQEIHQACRFGHVQHLEHLLFYGADMGAQNASGNTALHICALYNQESCARVLLFRGANRDVRNYNSQTAFQVAIIAGNFELAEVIKTHKDSDVVPFRETPSYAKRRRLAGPSGLASPRPLQRSASDINLKGEAQPAASPGPSLRSLPHQLLLQRLQEEKDRDRDADQESNISGPLAGRAGQSKIREGAGRPCPAPPAPPAPPPRGPKRKLYSAVPGRKFIAVKAHSPQGEGEIPLHRGEAVKVLSIGEGGFWEGTVKGRTGWFPADCVEEVQMRQHDTRPETREDRTKRLFRHYTVGSYDSLTSHSDYVIDDKVAVLQKRDHEGFGFVLRGAKAETPIEEFTPTPAFPALQYLESVDVEGVAWRAGLRTGDFLIEVNGVNVVKVGHKQVVALIRQGGNRLVMKVVSVTRKPEEDGARRRAPPPPKRAPSTTLTLRSKSMTAELEELASIRRRKGEKLDEMLAAAAEPTLRPDIADADSRAATVKQRPTSRRITPAEISSLFERQGLPGPEKLPGSLRKGIPRTKSVGEDEKLASLLEGRFPRSTSMQDPVREGRGIPPPPQTAPPPPPAPYYFDSGPPPAFSPPPPPGRAYDTVRSSFKPGLEARLGAGAAGLYEPGAALGPLPYPERQKRARSMIILQDSAPESGDAPRPPPAATPPERPKRRPRPPGPDSPYANLGAFSASLFAPSKPQRRKSPLVKQLQVEDAQERAALAVGSPGPGGGSFAREPSPTHRGPRPGGLDYGAGDGPGLAFGGPGPAKDRRLEERRRSTVFLSVGAIEGSAPGADLPSLQPSRSIDERLLGTGPTAGRDLLLPSPVSALKPLVSGPSLGPSGSTFIHPLTGKPLDPSSPLALALAARERALASQAPSRSPTPVHSPDADRPGPLFVDVQARDPERGSLASPAFSPRSPAWIPVPARREAEKVPREERKSPEDKKSMILSVLDTSLQRPAGLIVVHATSNGQEPSRLGGAEEERPGTPELAPAPMQSAAVAEPLPSPRAQPPGGTPADAGPGQGSSEEEPELVFAVNLPPAQLSSSDEETREELARIGLVPPPEEFANGVLLATPLAGPGPSPTTVPSPASGKPSSEPPPAPESAADSGVEEADTRSSSDPHLETTSTISTVSSMSTLSSESGELTDTHTSFADGHTFLLEKPPVPPKPKLKSPLGKGPVTFRDPLLKQSSDSELMAQQHHAASAGLASAAGPARPRYLFQRRSKLWGDPVESRGLPGPEDDKPTVISELSSRLQQLNKDTRSLGEEPVGGLGSLLDPAKKSPIAAARLFSSLGELSSISAQRSPGGPGGGASYSVRPSGRYPVARRAPSPVKPASLERVEGLGAGAGGAGRPFGLTPPTILKSSSLSIPHEPKEVRFVVRSVSARSRSPSPSPLPSPASGPGPGAPGPRRPFQQKPLQLWSKFDVGDWLESIHLGEHRDRFEDHEIEGAHLPALTKDDFVELGVTRVGHRMNIERALRQLDGS

SEQ ID NO: 35638 - protein, 1730 aa, Homo sapiens
  REGION 1..1730: note = ENSP00000489147
MDGPGASAVVVRVGIPDLQQTKCLRLDPAAPVWAAKQRVLCALNHSLQDALNYGLFQPPSRGRAGKFLDEERLLQEYPPNLDTPLPYLEFRYKRRVYAQNLIDDKQFAKLHTKANLKKFMDYVQLHSTDKVARLLDKGLDPNFHDPDSGECPLSLAAQLDNATDLLKVLKNGGAHLDFRTRDGLTAVHCATRQRNAAALTTLLDLGASPDYKDSRGLTPLYHSALGGGDALCCELLLHDHAQLGITDENGWQEIHQACRFGHVQHLEHLLFYGADMGAQNASGNTALHICALYNQESCARVLLFRGANRDVRNYNSQTAFQVAIIAGNFELAEVIKTHKDSDVVPFRETPSYAKRRRLAGPSGLASPRPLQRSASDINLKGEAQPAASPGPSLRSLPHQLLLQRLQEEKDRDRDADQESNISGPLAGRAGQSKISPAGPGDPGPGPGGPAPPAPPAPPPRGPKRKLYSAVPGRKFIAVKAHSPQGEGEIPLHRGEAVKVLSIGEGGFWEGTVKGRTGWFPADCVEEVQMRQHDTRPETREDRTKRLFRHYTVGSYDSLTSHSDYVIDDKVAVLQKRDHEGFGFVLRGAKAETPIEEFTPTPAFPALQYLESVDVEGVAWRAGLRTGDFLIEVNGVNVVKVGHKQVVALIRQGGNRLVMKVVSVTRKPEEDGARRRAPPPPKRAPSTTLTLRSKSMTAELEELASIRRRKGEKLDEMLAAAAEPTLRPDIADADSRAATVKQRPTSRRITPAEISSLFERQGLPGPEKLPGSLRKGIPRTKSVGEDEKLASLLEGRFPRSTSMQDPVREGRGIPPPPQTAPPPPPAPYYFDSGPPPAFSPPPPPGRAYDTVRSSFKPGLEARLGAGAAGLYEPGAALGPLPYPERQKRARSMIILQDSAPESGDAPRPPPAATPPERPKRRPRPPGPDSPYANLGAFSASLFAPSKPQRRKSPLVKQLQVEDAQERAALAVGSPGPGGGSFAREPSPTHRGPRPGGLDYGAGDGPGLAFGGPGPAKDRRLEERRRSTVFLSVGAIEGSAPGADLPSLQPSRSIDERLLGTGPTAGRDLLLPSPVSALKPLVSGPSLGPSGSTFIHPLTGKPLDPSSPLALALAARERALASQAPSRSPTPVHSPDADRPGPLFVDVQARDPERGSLASPAFSPRSPAWIPVPARREAEKVPREERKSPEDKKSMILSVLDTSLQRPAGLIVVHATSNGQEPSRLGGAEEERPGTPELAPAPMQSAAVAEPLPSPRAQPPGGTPADAGPGQGSSEEEPELVFAVNLPPAQLSSSDEETREELARIGLVPPPEEFANGVLLATPLAGPGPSPTTVPSPASGKPSSEPPPAPESAADSGVEEADTRSSSDPHLETTSTISTVSSMSTLSSESGELTDTHTSFADGHTFLLEKPPVPPKPKLKSPLGKGPVTFRDPLLKQSSDSELMAQQHHAASAGLASAAGPARPRYLFQRRSKLWGDPVESRGLPGPEDDKPTVISELSSRLQQLNKDTRSLGEEPVGGLGSLLDPAKKSPIAAARLFSSLGELSSISAQRSPGGPGGGASYSVRPSGRYPVARRAPSPVKPASLERVEGLGAGAGGAGRPFGLTPPTILKSSSLSIPHEPKEVRFVVRSVSARSRSPSPSPLPSPASGPGPGAPGPRRPFQQKPLQLWSKFDVGDWLESIHLGEHRDRFEDHEIEGAHLPALTKDDFVELGVTRVGHRMNIERALRQLDGS

SEQ ID NO: 35639 - protein, 1731 aa, Homo sapiens
  REGION 1..1731: note = ENSP00000490818
MDGPGASAVVVRVGIPDLQQTKCLRLDPAAPVWAAKQRVLCALNHSLQDALNYGLFQPPSRGRAGKFLDEERLLQEYPPNLDTPLPYLEFRYKRRVYAQNLIDDKQFAKLHTKANLKKFMDYVQLHSTDKVARLLDKGLDPNFHDPDSGECPLSLAAQLDNATDLLKVLKNGGAHLDFRTRDGLTAVHCATRQRNAAALTTLLDLGASPDYKDSRGLTPLYHSALGGGDALCCELLLHDHAQLGITDENGWQEIHQACRFGHVQHLEHLLFYGADMGAQNASGNTALHICALYNQESCARVLLFRGANRDVRNYNSQTAFQVAIIAGNFELAEVIKTHKDSDVVPFRETPSYAKRRRLAGPSGLASPRPLQRSASDINLKGEAQPAASPGPSLRSLPHQLLLQRLQEEKDRDRDADQESNISGPLAGRAGQSKISPSGPGGPGPAPGPGPAPPAPPAPPPRGPKRKLYSAVPGRKFIAVKAHSPQGEGEIPLHRGEAVKVLSIGEGGFWEGTVKGRTGWFPADCVEEVQMRQHDTRPETREDRTKRLFRHYTVGSYDSLTSHSDYVIDDKVAVLQKRDHEGFGFVLRGAKAETPIEEFTPTPAFPALQYLESVDVEGVAWRAGLRTGDFLIEVNGVNVVKVGHKQVVALIRQGGNRLVMKVVSVTRKPEEDGARRRAPPPPKRAPSTTLTLRSKSMTAELEELASIRRRKGEKLDEMLAAAAEPTLRPDIADADSRAATVKQRPTSRRITPAEISSLFERQGLPGPEKLPGSLRKGIPRTKSVGEDEKLASLLEGRFPRSTSMQDPVREGRGIPPPPQTAPPPPPAPYYFDSGPPPAFSPPPPPGRAYDTVRSSFKPGLEARLGAGAAGLYEPGAALGPLPYPERQKRARSMIILQDSAPESGDAPRPPPAATPPERPKRRPRPPGPDSPYANLGAFSASLFAPSKPQRRKSPLVKQLQVEDAQERAALAVGSPGPGGGSFAREPSPTHRGPRPGGLDYGAGDGPGLAFGGPGPAKDRRLEERRRSTVFLSVGAIEGSAPGADLPSLQPSRSIDERLLGTGPTAGRDLLLPSPVSALKPLVSGPSLGPSGSTFIHPLTGKPLDPSSPLALALAARERALASQAPSRSPTPVHSPDADRPGPLFVDVQARDPERGSLASPAFSPRSPAWIPVPARREAEKVPREERKSPEDKKSMILSVLDTSLQRPAGLIVVHATSNGQEPSRLGGAEEERPGTPELAPAPMQSAAVAEPLPSPRAQPPGGTPADAGPGQGSSEEEPELVFAVNLPPAQLSSSDEETREELARIGLVPPPEEFANGVLLATPLAGPGPSPTTVPSPASGKPSSEPPPAPESAADSGVEEADTRSSSDPHLETTSTISTVSSMSTLSSESGELTDTHTSFADGHTFLLEKPPVPPKPKLKSPLGKGPVTFRDPLLKQSSDSELMAQQHHAASAGLASAAGPARPRYLFQRRSKLWGDPVESRGLPGPEDDKPTVISELSSRLQQLNKDTRSLGEEPVGGLGSLLDPAKKSPIAAARLFSSLGELSSISAQRSPGGPGGGASYSVRPSGRYPVARRAPSPVKPASLERVEGLGAGAGGAGRPFGLTPPTILKSSSLSIPHEPKEVRFVVRSVSARSRSPSPSPLPSPASGPGPGAPGPRRPFQQKPLQLWSKFDVGDWLESIHLGEHRDRFEDHEIEGAHLPALTKDDFVELGVTRVGHRMNIERALRQLDGS

SEQ ID NO: 35640 - protein, 594 aa, Homo sapiens
  REGION 1..594: note = ENSP00000364995
MLPRTKYNRFRNDSVTSVDDLLHSLSVSGGGGKVSAARATPAAAPYLVSGEALRKAPDDGPGSLGHLLHKVSHLKLSSSGLRGLSSAARERAGARLSGSCSAPSLAAPDGSAPSAPRAPAMSAARKGRPGDEPLPRPPRGAPHASDQVLGPGVTYVVKYLGCIEVLRSMRSLDFSTRTQITREAISRVCEAVPGAKGAFKKRKPPSKMLSSILGKSNLQFAGMSISLTISTASLNLRTPDSKQIIANHHMRSISFASGGDPDTTDYVAYVAKDPVNRRACHILECCDGLAQDVIGSIGQAFELRFKQYLQCPTKIPALHDRMQSLDEPWTEEEGDGSDHPYYNSIPSKMPPPGGFLDTRLKPRPHAPDTAQFAGKEQTYYQGRHLGDTFGEDWQQTPLRQGSSDIYSTPEGKLHVAPTGEAPTYVNTQQIPPQAWPAAVSSAESSPRKDLFDMKPFEDALKNQPLGPVLSKAASVECISPVSPRAPDAKMLEELQAETWYQGEMSRKEAEGLLEKDGDFLVRKSTTNPGSFVLTGMHNGQAKHLLLVDPEGTIRTKDRVFDSISHLINHHLESSLPIVSAGSELCLQQPVERKQ

SEQ ID NO: 35641 - protein, 105 aa, Homo sapiens
  REGION 1..105: note = ENSP00000364991
MKPFEDALKNQPLGPVLSKAASVECISPVSPRAPDAKMLEELQAETWYQGEMSRKEAEGLLEKDGDFLVRKSTTNPGSFVLTGMHNGQAKHLLLVDPEGTRSNSY

SEQ ID NO: 35642 - protein, 630 aa, Homo sapiens
  REGION 1..630: note = ENSP00000329668
MRERGQDSLAGLVLYVGLFGHPGMLHRAKYSRFRNESITSLDEGSSGGSVGNKGSPQPPHPALAPHLPTEDATLPSQESPTPLCTLIPRMASMKLANPATLLSLKNFCLGTKEVPRLKLQESRDPGSSGPSSPETSLSRSGTAPPPQQDLVGHRATALTPDSCPLPGPGEPTLRSRQDRHFLQHLLGMGMNYCVRYMGCVEVLQSMRSLDFGMRTQVTREAISRLCEAVPGANGAIKKRKPPVKFLSTVLGKSNLQFSGMNIKLTISTCSLTLMNLDNQQIIANHHMQSISFASGGDPDTTDYVAYVAKDPVNQRACHILECHNGMAQDVISTIGQAFELRFKQYLKNPSLNTSCESEEVHIDSHAEEREDHEYYNEIPGKQPPVGGVSDMRIKVQATEQMAYCPIQCEKLCYLPGNSKCSSVYENCLEQSRAIGNVHPRGVQSQRDTSLLKHTCRVDLFDDPCYINTQALQSTPGSAGNQRSAQPLGSPWHCGKAPETVQPGATAQPASSHSLPHIKQQLWSEECYHGKLSRKAAESLLVKDGDFLVRESATSPGQYVLSGLQGGQAKHLLLVDPEGKVRTKDHVFDNVGHLIRYHMDNSLPIISSGSEVSLKQPVRKDNNPALLHSNK

SEQ ID NO: 35643 - protein, 387 aa, Homo sapiens
  REGION 1..387: note = ENSP00000379786
MLPALEHWIPKFFSFRTRTGSPLSLACRQPIVGPCDHIIANHHMQSISFASGGDPDTTDYVAYVAKDPVNQRACHILECHNGMAQDVISTIGQAFELRFKQYLKNPSLNTSCESEEVHIDSHAEEREDHEYYNEIPGKQPPVGGVSDMRIKVQATEQMAYCPIQCEKLCYLPGNSKCSSVYENCLEQSRAIGNVHPRGVQSQRDTSLLKHTCRVDLFDDPCYINTQALQSTPGSAGNQRSAQPLGSPWHCGKAPETVQPGATAQPASSHSLPHIKQQLWSEECYHGKLSRKAAESLLVKDGDFLVRESATSPGQYVLSGLQGGQAKHLLLVDPEGKVRTKDHVFDNVGHLIRYHMDNSLPIISSGSEVSLKQPVRKDNNPALLHSNK

SEQ ID NO: 35644 - protein, 344 aa, Homo sapiens
  REGION 1..344: note = ENSP00000443300
MQSISFASGGDPDTTDYVAYVAKDPVNQRACHILECHNGMAQDVISTIGQAFELRFKQYLKNPSLNTSCESEEVHIDSHAEEREDHEYYNEIPGKQPPVGGVSDMRIKVQATEQMAYCPIQCEKLCYLPGNSKCSSVYENCLEQSRAIGNVHPRGVQSQRDTSLLKHTCRVDLFDDPCYINTQALQSTPGSAGNQRSAQPLGSPWHCGKAPETVQPGATAQPASSHSLPHIKQQLWSEECYHGKLSRKAAESLLVKDGDFLVRESATSPGQYVLSGLQGGQAKHLLLVDPEGKVRTKDHVFDNVGHLIRYHMDNSLPIISSGSEVSLKQPVRKDNNPALLHSNK

SEQ ID NO: 35645 - protein, 144 aa, Homo sapiens
  REGION 1..144: note = ENSP00000453344
MQSISFASGGDPDTTDYVAYVAKDPVNQRACHILECHNGMAQDVISTIGQAFELRFKQYLKNPSLNTSCESEEVHIDSHAEEREDHEYYNEIPGKQPPVGGVSDMRIKVQATEQMAYCPIQCEKLCYLVMSIQEGCSPSEIPHY

SEQ ID NO: 35646 - protein, 128 aa, Homo sapiens
  REGION 1..128: note = ENSP00000453397
MQSISFASGGDPDTTDYVAYVAKDPVNQRACHILECHNGMAQDVISTIGQAFELRFKQYLKNPSLNTSCESEEVHIDSHAEEREDHEYYNEIPGKQPPVGGVSDMRIKVQATEQMAYCPIQCEKLCYL

SEQ ID NO: 35647 - protein, 367 aa, Homo sapiens
  REGION 1..367: note = ENSP00000453370
MLLSGAPPAGSRPGPRTQGSAGGGPGGSRRGAGGAGAGPGGGGSGGVAKWLREHLGFRGGGGGGGGSKPAPPEPDYRPPAPSPAAPPAPPPDILAAYRLQRERDFEDPYSGGSSGSAALATPVAPGPTPPPRHGSPPHRLIRVETPGPPAPPADERISGPPASSDRLAILEDYADPFDVQETGEGSAGASGAPEKVPENDGYMEPYEAQKMMAEIRGSKETATQPLPLYDTPYEPEEDGATAEGEGAPWPRESRLPEDDERPPEEYDQPWEWKKERISKAFAAQFEGPEKSCLSPGREEKGRLPPRLSAGNPKSAKPLSMEPSSPLGEWTDPALPLENQLVSRGHQPNRRREPAPAVQRGQLPGAQQ

SEQ ID NO: 35648 - protein, 423 aa, Homo sapiens
  REGION 1..423: note = ENSP00000290894
MQQEGGPVRSAPCRTGTLEGSRQGSPGHRKRASPKGSLSSAQPHSWMLTPSPLNSHCAHREPISSSPQPVANGPKQKKKSNWRSTTRLRIIRLRDRLEPRPLAILEDYADPFDVQETGEGSAGASGAPEKVPENDGYMEPYEAQKMMAEIRGSKETATQPLPLYDTPYEPEEDGATAEGEGAPWPRESRLPEDDERPPEEYDQPWEWKKERISKAFAVDIKVIKDLPWPPPVGQLDSSPSLPDGDRDISGPASPLPEPSLEDSSAQFEGPEKSCLSPGREEKGRLPPRLSAGNPKSAKPLSMEPSSPLGEWTDPALPLENQVWYHGAISRTDAENLLRLCKEASYLVRNSETSKNDFSLSLKSSQGFMHMKLSRTKEHKYVLGQNSPPFSSVPEIVHHYASRKLPIKGAEHMSLLYPVAIRTL

SEQ ID NO: 35649 - protein, 290 aa, Homo sapiens
  REGION 1..290: note = ENSP00000453168
MLLSGAPPAGSRPGPRTQGSAGGGPGGSRRGAGGAGAGPGGGGSGGVAKWLREHLGFRGGGGGGGGSKPAPPEPDYRPPAPSPAAPPAPPPDILAAYRLQRERDFEDPYSGGSSGSAALATPVAPGPTPPPRHGSPPHRLIRVETPGPPAPPADERISGPPASSDRLAILEDYADPFDVQETGEGSAGASGAPEKVPENDGYMEPYEAQKMMAEIRGSKETATQPLPLYDTPYEPEEDGATAEGEGAPWPRESRLPEDDERPPEEYDQPWEWKKERISKAFAGAARDSCT

SEQ ID NO: 35650 - protein, 239 aa, Homo sapiens
  REGION 1..239: note = ENSP00000411530
MEPYEAQKMMAEIRGSKETATQPLPLYDTPYEPEEDGATAEGEGAPWPRESRLPEDDERPPEEYDQPWEWKKERISKAFAAQFEGPEKSCLSPGREEKGRLPPRLSAGNPKSAKPLSMEPSSPLGEWTDPALPLENQVWYHGAISRTDAENLLRLCKEASYLVRNSETSKNDFSLSLKSSQGFMHMKLSRTKEHKYVLGQNSPPFSSVPEIVHHYASRKLPIKGAEHMSLLYPVAIRTL

SEQ ID NO: 35651 - protein, 163 aa, Homo sapiens
  REGION 1..163: note = ENSP00000454034
  VARIANT 1: note = Any amino acid
XPWPRESRLPEDDERPPEEYDQPWEWKKERISKAFAGDTHNGWAWTARDPAEMPPFLSLILSWYHGAISRTDAENLLRLCKEASYLVRNSETSKNDFSLSLKSSQGFMHMKLSRTKEHKYVLGQNSPPFSSVPEIVHHYASRKLPIKGAEHMSLLYPVAIRTL

SEQ ID NO: 35652 - protein, 161 aa, Homo sapiens
  REGION 1..161: note = ENSP00000453676
  VARIANT 1: note = Any amino acid
XSPSLPDGDRDISGPASPLPEPSLEDSSAQFEGPEKSCLSPGREEKGRLPPRLSAGNPKSAKPLSMEPSSPLGEWTDPALPLENQVWYHGAISRTDAENLLRLCKEASYLLSYSRSLNCKIKEAFPRKVFVKNLIYITSEMCIALKIIKFMEHTKQPVYHF

SEQ ID NO: 35653 - protein, 414 aa, Homo sapiens
  REGION 1..414: note = ENSP00000453260
MLLSGAPPAGSRPGPRTQGSAGGGPGGSRRGAGGAGAGPGGGGSGGVAKWLREHLGFRGGGGGGGGSKPAPPEPDYRPPAPSPAAPPAPPPDILAAYRLQRERDFEDPYSGGSSGSAALATPVAPGPTPPPRHGSPPHRLIRVETPGPPAPPADERISGPPASSDRLAILEDYADPFDVQETGEGSAGASGAPEKVPENDGYMEPYEAQKMMAEIRGSKETATQPLPLYDTPYEPEEDGATAEGEGAPWPRESRLPEDDERPPEEYDQPWEWKKERISKAFAVDIKVIKDLPWPPPVGQLDSSPSLPDGDRDISGPASPLPEPSLEDSSAQFEGPEKSCLSPGREEKGRLPPRLSAGNPKSAKPLSMEPSSPLGEWTDPALPLENQLVSRGHQPNRRREPAPAVQRGQLPGAQQ

SEQ ID NO: 35654 - protein, 199 aa, Homo sapiens
  REGION 1..199: note = ENSP00000452726
  VARIANT 1: note = Any amino acid
XGEGSAGASGAPEKVPENDGYMEPYEAQKMMAEIRGSKETATQPLPLYDTPYEPEEDGATAEGEGAPWPRESRLPEDDERPPEEYDQPWEWKKERISKAFAAQFEGPEKSCLSPGREEKGRLPPRLSAGNPKSAKPLSMEPSSPLGEWTDPALPLENQVWYHGAISRTDAENLLRLCKEASYLVRNSETSKNDFSLSLK

SEQ ID NO: 35655 - protein, 146 aa, Homo sapiens
  REGION 1..146: note = ENSP00000453827
  VARIANT 1: note = Any amino acid
XDQPWEWKKERISKAFAVDIKVIKDLPWPPPVGQLDSSPSLPDGDRDISGPASPLPEPSLEDSSAQFEGPEKSCLSPGREEKGRLPPRLSAGNPKSAKPLSMEPSSPLGEWTDPALPLENQVGHPQWVGLDSEGPSRDAPLPLSHP

SEQ ID NO: 35656 - protein, 26 aa, Homo sapiens
  REGION 1..26: note = ENSP00000453986
MEPYEAQKMMAEIRGSKETATQPLPL

SEQ ID NO: 35657 - protein, 551 aa, Homo sapiens
  REGION 1..551: note = ENSP00000390084
MALRRLLLLLLLSLESLDLLPSVHGARGRAANRTLSAGGAAVGGRRAGGALARGGRELNGTARAPGIPEAGSRRGQPAAAVAAAASAAVTYETCWGYYDVSGQYDKEFECNNSESGYLYCCGTCYYRFCCKKRHEKLDQRQCTNYQSPVWVQTPSTKVVSPGPENKYDPEKDKTNFTVYITCGVIAFVIVAGVFAKVSYDKAHRPPREMNIHRALADILRQQGPIPIAHCERETISAIDTSPKENTPVRSSSKNHYTPVRTAKQTPGHYGKDAYRSGGPDLHNFISSGFVTLGRGHTKGDHQYNHPILSSVTQIPPHEKPRMNNILTSATEPYDLSFSRSFQNLAHLPPSYESAVKTNPSKYSSLKRLTDKEADEYYMRRRHLPDLAARGTLPLNVIQMSQQKPLPRERPRRPIRAMSQDRVLSPDRGLPDEFSMPYDRILSDEQLLSTERLHSQDPLLSPERTAFPEQSLSRAISHTDVFVSTPVLDRYRMSKMHSHPSASNNSYATLGQSQTAAKRHAFASRRHNTVEQLHYIPGHHTCYTASKTEVTV

SEQ ID NO: 35658 - protein, 532 aa, Homo sapiens
  REGION 1..532: note = ENSP00000388659
MALRRLLLLLLLSLESLDLLPSVHGARGRAANRTLSAGGAAVGGRRAGGALARGGRELNGTARAPGIPEAGSRRGQPAAAVAAAASAAVTYETCWGYYDVSGQYDKEFECNNSESGYLYCCGTCYYRFCCKKRHEKLDQRQCTNYQSPVWVQTPSTKVVSPGPENKYDPEKDKTNFTVYITCGVIAFVIVAGVFAKVSYDKAHRPPREMNIHRALADILRQQGPIPIAHCERETISAIDTSPKENTPVRSSSKNHYTPVRTAKQTPGHYGKDAYRSGGPDLHNFISSGFVTLGRGHTKEKPRMNNILTSATEPYDLSFSRSFQNLAHLPPSYESAVKTNPSKYSSLKRLTDKEADEYYMRRRHLPDLAARGTLPLNVIQMSQQKPLPRERPRRPIRAMSQDRVLSPDRGLPDEFSMPYDRILSDEQLLSTERLHSQDPLLSPERTAFPEQSLSRAISHTDVFVSTPVLDRYRMSKMHSHPSASNNSYATLGQSQTAAKRHAFASRRHNTVEQLHYIPGHHTCYTASKTEVTV

SEQ ID NO: 35659 - protein, 500 aa, Homo sapiens
  REGION 1..500: note = ENSP00000387157
MALRRLLLLLLLSLESLDLLPSVHGARGRAANRTLSAGGAAVGGRRAGGALARGGRELNGTARAPGIPEAGSRRGQPAAAVAAAASAAVTYETCWGYYDVSGQYDKEFECNNSESGYLYCCGTCYYRFCCKKRHEKLDQRQCTNYQSPVWVQTPSTKVVSPGPENKYDPEKDKTNFTVYITCGVIAFVIVAGVFAKVSYDKAHRPPREMNIHRALADILRQQGPIPIAHCERETISAIDTSPKENTPVRSSSKNHYTPVRTAKQTPEKPRMNNILTSATEPYDLSFSRSFQNLAHLPPSYESAVKTNPSKYSSLKRLTDKEADEYYMRRRHLPDLAARGTLPLNVIQMSQQKPLPRERPRRPIRAMSQDRVLSPDRGLPDEFSMPYDRILSDEQLLSTERLHSQDPLLSPERTAFPEQSLSRAISHTDVFVSTPVLDRYRMSKMHSHPSASNNSYATLGQSQTAAKRHAFASRRHNTVEQLHYIPGHHTCYTASKTEVTV

SEQ ID NO: 35660 - protein, 134 aa, Homo sapiens
  REGION 1..134: note = ENSP00000477331
  VARIANT 1: note = Any amino acid
XTNFTVYITCGVIAFVIVAGVFAKVSYDKAHRPPREMNIHRALADILRQQGPIPIAHCERETISAIDTSPKENTPVRSSSKNHYTPVRTAKQTPGHYGKDAYRSGGPDLHNFISSGFVTLGRGHTKGTVETIFY

SEQ ID NO: 35661 - protein, 538 aa, Homo sapiens
  REGION 1..538: note = ENSP00000365503
MPALLLLVLLASSAGQARARPSNATSAEPAGPLPALLAHLRRLTGALTGGGGAASPGANGTRTGPAGGAGAAARAPPPAELCHGYYDVMGQYDATFNCSTGSYRFCCGTCHYRFCCEHRHMRLAQASCSNYDTPRWATTPPPLAGGAGGAGGAGGGPGPGQAGWLEGGRTGGAGGRGGEGPGGSTAYVVCGVISFALAVGVGAKVAFSKASRAPRAHRDINVPRALVDILRHQAGPGTRPDRARSSSLTPGIGGPDSMPPRTPKNLYNTVKTPNLDWRALPPPSPSLHYSTLSCSRSFHNLSHLPPSYEAAVKSELNRYSSLKRLAEKDLDEAYLKRRPLELPRGTLPLHALRRPGTGGGYRMEAWGGPEELGLAPAPNPRRVMSQEHLLGDGGRSRYEFTLPRARLVSQEHLLLSSPEALRQSREHLLSPPRSPALPPDPTARASLAASHSNLLLGPGGPPTPLRGLPPPSSLHAHHHHALHGSPQPAWMSDAGGGGGTLARRPPFQRQGTLEQLQFIPGHHLPQHLRTASKNEVTV

SEQ ID NO: 35662 - protein, 153 aa, Homo sapiens
  REGION 1..153: note = ENSP00000401307
  VARIANT 1: note = Any amino acid
XGGEGPGGSTAYVVCGVISFALAVGVGAKVAFSKASRAPRAHRDINVPRALVDILRHQAGPGTRPDRARSSSLTPGIGGPDSMPPRTPKNLYNTVKTPNLATCTSTSTAPSTTPPHWTGEPCRRPAPPCTTPRCPALGPSTTSRICPRPTRLP

SEQ ID NO: 35663 - protein, 162 aa, Homo sapiens
  REGION 1..162: note = ENSP00000389964
  VARIANT 1: note = Any amino acid
XSGRAGAPEAQGPAAPGTTAPEGGDRCRGYYDVMGQWDPPFNCSSGAYSFCCGTCGYRFCCHDGPRRLDQSRCSNYDTPAWVQTGRPPARARDTAAPRDPGRERSHTAVYAVCGVAALLVLAGIGARLGLERAHSPRARRTVTRALTELLKQPGPQEPLPPT

SEQ ID NO: 35664 - protein, 397 aa, Homo sapiens
  REGION 1..397: note = ENSP00000481203
MARAGARGLLGGRRPPGLRLALALRLALLLARPPSGRAGAPEAQGPAAPGTTAPEGGDRCRGYYDVMGQWDPPFNCSSGAYSFCCGTCGYRFCCHDGPRRLDQSRCSNYDTPAWVQTGRPPARARDTAAPRDPGRERSHTAVYAVCGVAALLVLAGIGARLGLERAHSPRARRTVTRALTELLKQPGPQEPLPPTLGPPLGGCVQVQMGDGLPRGSPHNSADKKRLNNAPRGSAAPGPPRGPRLQGGGSLTLQPDYAKYATFKAAALKAAEAAPRDFCQRFPALEPSPRQPPARAPRPSPDLPAPLDACPWAPPVYAPPAAPGPYAAWTSSRPARPAPLSHPTARAFQVPRRPGHAARRQFSVKMPETFNPQLPGLYGSAGRGSRYLRTNSKTEVTV

SEQ ID NO: 35665 - protein, 1616 aa, Homo sapiens
  REGION 1..1616: note = ENSP00000370299
MEGAEPRARPERLAEAETRAADGGRLVEVQLSGGAPWGFTLKGGREHGEPLVITKIEEGSKAAAVDKLLAGDEIVGINDIGLSGFRQEAICLVKGSHKTLKLVVKRRSELGWRPHSWHATKFSDSHPELAASPFTSTSGCPSWSGRHHASSSSHDLSSSWEQTNLQRTLDHFSSLGSVDSLDHPSSRLSVAKSNSSIDHLGSHSKRDSAYGSFSTSSSTPDHTLSKADTSSAENILYTVGLWEAPRQGGRQAQAAGDPQGSEEKLSCFPPRVPGDSGKGPRPEYNAEPKLAAPGRSNFGPVWYVPDKKKAPSSPPPPPPPLRSDSFAATKSHEKAQGPVFSEAAAAQHFTALAQAQPRGDRRPELTDRPWRSAHPGSLGKGSGGPGCPQEAHADGSWPPSKDGASSRLQASLSSSDVRFPQSPHSGRHPPLYSDHSPLCADSLGQEPGAASFQNDSPPQVRGLSSCDQKLGSGWQGPRPCVQGDLQAAQLWAGCWPSDTALGALESLPPPTVGQSPRHHLPQPEGPPDARETGRCYPLDKGAEGCSAGAQEPPRASRAEKASQRLAASITWADGESSRICPQETPLLHSLTQEGKRRPESSPEDSATRPPPFDAHVGKPTRRSDRFATTLRNEIQMHRAKLQKSRSTVALTAAGEAEDGTGRWRAGLGGGTQEGPLAGTYKDHLKEAQARVLRATSFKRRDLDPNPGDLYPESLEHRMGDPDTVPHFWEAGLAQPPSSTSGGPHPPRIGGRRRFTAEQKLKSYSEPEKMNEVGLTRGYSPHQHPRTSEDTVGTFADRWKFFEETSKPVPQRPAQKQALHGIPRDKPERPRTAGRTCEGTEPWSRTTSLGDSLNAHSAAEKAGTSDLPRRLGTFAEYQASWKEQRKPLEARSSGRCHSADDILDVSLDPQERPQHVHGRSRSSPSTDHYKQEASVELRRQAGDPGEPREELPSAVRAEEGQSTPRQADAQCREGSPGSQQHPPSQKAPNPPTFSELSHCRGAPELPREGRGRAGTLPRDYRYSEESTPADLGPRAQSPGSPLHARGQDSWPVSSALLSKRPAPQRPPPPKREPRRYRATDGAPADAPVGVLGRPFPTPSPASLDVYVARLSLSHSPSVFSSAQPQDTPKATVCERGSQHVSGDASRPLPEALLPPKQQHLRLQTATMETSRSPSPQFAPQKLTDKPPLLIQDEDSTRIERVMDNNTTVKMVPIKIVHSESQPEKESRQSLACPAEPPALPHGLEKDQIKTLSTSEQFYSRFCLYTRQGAEPEAPHRAQPAEPQPLGTQVPPEKDRCTSPPGLSYMKAKEKTVEDLKSEELAREIVGKDKSLADILDPSVKIKTTMDLMEGIFPKDEHLLEEAQQRRKLLPKIPSPRSTEERKEEPSVPAAVSLATNSTYYSTSAPKAELLIKMKDLQEQQEHEEDSGSDLDHDLSVKKQELIESISRKLQVLREARESLLEDVQANTVLGAEVEAIVKGVCKPSEFDKFRMFIGDLDKVVNLLLSLSGRLARVENALNNLDDGASPGDRQSLLEKQRVLIQQHEDAKELKENLDRRERIVFDILANYLSEESLADYEHFVKMKSALIIEQRELEDKIHLGEEQLKCLLDSLQPERGK

SEQ ID NO: 35666 - protein, 375 aa, Homo sapiens
  REGION 1..375: note = ENSP00000406724
METSRSPSPQFAPQKLTDKPPLLIQDEDSTRIERVMDNNTTVKMVPIKIVHSESQPEKESRQSLACPAEPPALPHGLEKDQIKTLSTSEQFYSRFCLYTRQGAEPEAPHRAQPAEPQPLGTQVPPEKDRCTSPPGLSYMKAKEKTVEDLKSEELAREIVGKDKSLADILDPSVKIKTTMDLMEGIFPKDEHLLEEAQQRRKLLPKIPSPRSTEERKEEPSVPAAVSLATNSTYYSTSAPKAELLIKMKDLQEQQEHEEDSGSDLDHDLSVKKQELIESISRKLQVLREARESLLEDVQANTVLGAEVEAIVKGVCKPSEFDKFRMFIGDLDKVVNLLLSLSGRLARVENALNNLDDGASPGDRQSLLEKQRVLIQ

SEQ ID NO: 35667 - protein, 450 aa, Homo sapiens
  REGION 1..450: note = ENSP00000415229
METSRSPSPQFAPQKLTDKPPLLIQDEDSTRIERVMDNNTTVKMVPIKIVHSESQPEKESRQSLACPAEPPALPHGLEKDQIKTLSTSEQFYSRFCLYTRQGAEPEAPHRAQPAEPQPLGTQVPPEKDRCTSPPGLSYMKAKEKTVEDLKSEELAREIVGKDKSLADILDPSVKIKTTMDLMEGIFPKDEHLLEEAQQRRKLLPKIPSPRSTEERKEEPSVPAAVSLATNSTYYSTSAPKAELLIKMKDLQEQQEHEEDSGSDLDHDLSVKKELIESISRKLQVLREARESLLEDVQANTVLGAEVEAIVKGVCKPSEFDKFRMFIGDLDKVVNLLLSLSGRLARVENALNNLDDGASPGDRQSLLEKQRVLIQQHEDAKELKENLDRRERIVFDILANYLSEESLADYEHFVKMKSALIIEQRELEDKIHLGEEQLKCLLDSLQPERGK

SEQ ID NO: 35668 - protein, 1996 aa, Homo sapiens
  REGION 1..1996: note = ENSP00000296043
MMRTTEDFHKPSATLNSNTATKGRYIYLEAFLEGGAPWGFTLKGGLEHGEPLIISKVEEGGKADTLSSKLQAGDEVVHINEVTLSSSRKEAVSLVKGSYKTLRLVVRRDVCTDPGHADTGASNFVSPEHLTSGPQHRKAAWSGGVKLRLKHRRSEPAGRPHSWHTTKSGEKQPDASMMQISQGMIGPPWHQSYHSSSSTSDLSNYDHAYLRRSPDQCSSQGSMESLEPSGAYPPCHLSPAKSTGSIDQLSHFHNKRDSAYSSFSTSSSILEYPHPGISGRERSGSMDNTSARGGLLEGMRQADIRYVKTVYDTRRGVSAEYEVNSSALLLQGREARASANGQGYDKWSNIPRGKGVPPPSWSQQCPSSLETATDNLPPKVGAPLPPARSDSYAAFRHRERPSSWSSLDQKRLCRPQANSLGSLKSPFIEEQLHTVLEKSPENSPPVKPKHNYTQKAQPGQPLLPTSIYPVPSLEPHFAQVPQPSVSSNGMLYPALAKESGYIAPQGACNKMATIDENGNQNGSGRPGFAFCQPLEHDLLSPVEKKPEATAKYVPSKVHFCSVPENEEDASLKRHLTPPQGNSPHSNERKSTHSNKPSSHPHSLKCPQAQAWQAGEDKRSSRLSEPWEGDFQEDHNANLWRRLEREGLGQSLSGNFGKTKSAFSSLQNIPESLRRHSSLELGRGTQEGYPGGRPTCAVNTKAEDPGRKAAPDLGSHLDRQVSYPRPEGRTGASASFNSTDPSPEEPPAPSHPHTSSLGRRGPGPGSASALQGFQYGKPHCSVLEKVSKFEQREQGSQRPSVGGSGFGHNYRPHRTVSTSSTSGNDFEETKAHIRFSESAEPLGNGEQHFKNGELKLEEASRQPCGQQLSGGASDSGRGPQRPDARLLRSQSTFQLSSEPEREPEWRDRPGSPESPLLDAPFSRAYRNSIKDAQSRVLGATSFRRRDLELGAPVASRSWRPRPSSAHVGLRSPEASASASPHTPRERHSVTPAEGDLARPVPPAARRGARRRLTPEQKKRSYSEPEKMNEVGIVEEAEPAPLGPQRNGMRFPESSVADRRRLFERDGKACSTLSLSGPELKQFQQSALADYIQRKTGKRPTSAAGCSLQEPGPLRERAQSAYLQPGPAALEGSGLASASSLSSLREPSLQPRREATLLPATVAETQQAPRDRSSSFAGGRRLGERRRGDLLSGANGGTRGTQRGDETPREPSSWGARAGKSMSAEDLLERSDVLAGPVHVRSRSSPATADKRQDVLLGQDSGFGLVKDPCYLAGPGSRSLSCSERGQEEMLPLFHHLTPRWGGSGCKAIGDSSVPSECPGTLDHQRQASRTPCPRPPLAGTQGLVTDTRAAPLTPIGTPLPSAIPSGYCSQDGQTGRQPLPPYTPAMMHRSNGHTLTQPPGPRGCEGDGPEHGVEEGTRKRVSLPQWPPPSRAKWAHAAREDSLPEESSAPDFANLKHYQKQQSLPSLCSTSDPDTPLGAPSTPGRISLRISESVLRDSPPPHEDYEDEVFVRDPHPKATSSPTFEPLPPPPPPPPSQETPVYSMDDFPPPPPHTVCEAQLDSEDPEGPRPSFNKLSKVTIARERHMPGAAHVVGSQTLASRLQTSIKGSEAESTPPSFMSVHAQLAGSLGGQPAPIQTQSLSHDPVSGTQGLEKKVSPDPQKSSEDIRTEALAKEIVHQDKSLADILDPDSRLKTTMDLMEGLFPRDVNLLKENSVKRKAIQRTVSSSGCEGKRNEDKEAVSMLVNCPAYYSVSAPKAELLNKIKEMPAEVNEEEEQADVNEKKAELIGSLTHKLETLQEAKGSLLTDIKLNNALGEEVEALISELCKPNEFDKYRMFIGDLDKVVNLLLSLSGRLARVENVLSGLGEDASNEERSSLYEKRKILAGQHEDARELKENLDRRERVVLGILANYLSEEQLQDYQHFVKMKSTLLIEQRKLDDKIKLGQEQVKCLLESLPSDFIPKAGALALPPNLTSEPIPAGGCTFSGIFPTLTSPL

SEQ ID NO: 35669 - protein, 1493 aa, Homo sapiens
  REGION 1..1493: note = ENSP00000289292
MENRPGSFQYVPVQLQGGAPWGFTLKGGLEHCEPLTVSKIEDGGKAALSQKMRTGDELVNINGTPLYGSRQEALILIKGSFRILKLIVRRRNAPVSRPHSWHVAKLLEGCPEAATTMHFPSEAFSLSWHSGCNTSDVCVQWCPLSRHCSTEKSSSIGSMESLEQPGQATYESHLLPIDQNMYPNQRDSAYSSFSASSNASDCALSLRPEEPASTDCIMQGPGPTKAPSGRPNVAETSGGSRRTNGGHLTPSSQMSSRPQEGYQSGPAKAVRGPPQPPVRRDSLQASRAQLLNGEQRRASEPVVPLPQKEKLSLEPVLPARNPNRFCCLSGHDQVTSEGHQNCEFSQPPESSQQGSEHLLMQASTKAVGSPKACDRASSVDSNPLNEASAELAKASFGRPPHLIGPTGHRHSAPEQLLASHLQHVHLDTRGSKGMELPPVQDGHQWTLSPLHSSHKGKKSPCPPTGGTHDQSSKERKTRQVDDRSLVLGHQSQSSPPHGEADGHPSEKGFLDPNRTSRAASELANQQPSASGSLVQQATDCSSTTKAASGTEAGEEGDSEPKECSRMGGRRSGGTRGRSIQNRRKSERFATNLRNEIQRRKAQLQKSKGPLSQLCDTKEPVEETQEPPESPPLTASNTSLLSSCKKPPSPRDKLFNKSMMLRARSSECLSQAPESHESRTGLEGRISPGQRPGQSSLGLNTWWKAPDPSSSDPEKAHAHCGVRGGHWRWSPEHNSQPLVAAAMEGPSNPGDNKELKASTAQAGEDAILLPFADRRKFFEESSKSLSTSHLPGLTTHSNKTFTQRPKPIDQNFQPMSSSCRELRRHPMDQSYHSADQPYHATDQSYHSMSPLQSETPTYSECFASKGLENSMCCKPLHCGDFDYHRTCSYSCSVQGALVHDPCIYCSGEICPALLKRNMMPNCYNCRCHHHQCIRCSVCYHNPQHSALEDSSLAPGNTWKPRKLTVQEFPGDKWNPITGNRKTSQSGREMAHSKTSFSWATPFHPCLENPALDLSSYRAISSLDLLGDFKHALKKSEETSVYEEGSSLASMPHPLRSRAFSESHISLAPQSTRAWGQHRRELFSKGDETQSDLLGARKKAFPPPRPPPPNWEKYRLFRAAQQQKQQQQQQKQQEEEEEEEEEEEEEEEEEEEEAEEEEEELPPQYFSSETSGSCALNPEEVLEQPQPLSFGHLEGSRQGSQSVPAEQESFALHSSDFLPPIRGHLGSQPEQAQPPCYYGIGGLWRTSGQEATESAKQEFQHFSPPSGAPGIPTSYSAYYNISVAKAELLNKLKDQPEMAEIGLGEEEVDHELAQKKIQLIESISRKLSVLREAQRGLLEDINANSALGEEVEANLKAVCKSNEFEKYHLFVGDLDKVVNLLLSLSGRLARVENALNSIDSEANQEKLVLIEKKQQLTGQLADAKELKEHVDRREKLVFGMVSRYLPQDQLQDYQHFVKMKSALIIEQRELEEKIKLGEEQLKCLRESLLLGPSNF

SEQ ID NO: 35670 - protein, 1377 aa, Homo sapiens
  REGION 1..1377: note = ENSP00000421450
MHFPSEAFSLSWHSGCNTSDVCVQWCPLSRHCSTEKSSSIGSMESLEQPGQATYESHLLPIDQNMYPNQRDSAYSSFSASSNASDCALSLRPEEPASTDCIMQGPGPTKAPSGRPNVAETSGGSRRTNGGHLTPSSQMSSRPQEGYQSGPAKAVRGPPQPPVRRDSLQASRAQLLNGEQRRASEPVVPLPQKEKLSLEPVLPARNPNRFCCLSGHDQVTSEGHQNCEFSQPPESSQQGSEHLLMQASTKAVGSPKACDRASSVDSNPLNEASAELAKASFGRPPHLIGPTGHRHSAPEQLLASHLQHVHLDTRGSKGMELPPVQDGHQWTLSPLHSSHKGKKSPCPPTGGTHDQSSKERKTRQVDDRSLVLGHQSQSSPPHGEADGHPSEKGFLDPNRTSRAASELANQQPSASGSLVQQATDCSSTTKAASGTEAGEEGDSEPKECSRMGGRRSGGTRGRSIQNRRKSERFATNLRNEIQRRKAQLQKSKGPLSQLCDTKEPVEETQEPPESPPLTASNTSLLSSCKKPPSPRDKLFNKSMMLRARSSECLSQAPESHESRTGLEGRISPGQRPGQSSLGLNTWWKAPDPSSSDPEKAHAHCGVRGGHWRWSPEHNSQPLVAAAMEGPSNPGDNKELKASTAQAGEDAILLPFADRRKFFEESSKSLSTSHLPGLTTHSNKTFTQRPKPIDQNFQPMSSSCRELRRHPMDQSYHSADQPYHATDQSYHSMSPLQSETPTYSECFASKGLENSMCCKPLHCGDFDYHRTCSYSCSVQGALVHDPCIYCSGEICPALLKRNMMPNCYNCRCHHHQCIRCSVCYHNPQHSALEDSSLAPGNTWKPRKLTVQEFPGDKWNPITGNRKTSQSGREMAHSKTSFSWATPFHPCLENPALDLSSYRAISSLDLLGDFKHALKKSEETSVYEEGSSLASMPHPLRSRAFSESHISLAPQSTRAWGQHRRELFSKGDETQSDLLGARKKAFPPPRPPPPNWEKYRLFRAAQQQKQQQQQQKQQEEEEEEEEEEEEEEEEEEEEAEEEEEELPPQYFSSETSGSCALNPEEVLEQPQPLSFGHLEGSRQGSQSVPAEQESFALHSSDFLPPIRGHLGSQPEQAQPPCYYGIGGLWRTSGQEATESAKQEFQHFSPPSGAPGIPTSYSAYYNISVAKAELLNKLKDQPEMAEIGLGEEEVDHELAQKKIQLIESISRKLSVLREAQRGLLEDINANSALGEEVEANLKAVCKSNEFEKYHLFVGDLDKVVNLLLSLSGRLARVENALNSIDSEANQEKLVLIEKKQQLTGQLADAKELKEHVDRREKLVFGMVSRYLPQDQLQDYQHFVKMKSALIIEQRELEEKIKLGEEQLKCLRESLLLGPSNF

SEQ ID NO: 35671 - protein, 1493 aa, Homo sapiens; identical to SEQ ID NO: 35669
  REGION 1..1493: note = ENSP00000365188

SEQ ID NO: 35672 - protein, 456 aa, Homo sapiens
  REGION 1..456: note = ENSP00000480109
MNSSDEEKQLQLITSLKEQAIGEYEDLRAENQKTKEKCDKIRQERDEAVKKLEEFQKISHMVIEEVNFMQNHLEIEKTCRESAEALATKLNKENKTLKRISMLYMAKLGPDVITEEINIDDEDSTTDTDGAAETCVSVQCQKQIKELRDQIVSVQEEKKILAIELENLKSKLVEVIEEVNKVKQEKTVLNSEVLEQRKVLEKCNRVSMLAVEEYEEMQVNLELEKDLRKKAESFAQEMFIEQNKLKRQSHLLLQSSIPDQQLLKALDENAKLTQQLEEERIQHQQKVKELEEQLENETLHKEIHNLKQQLELLEEDKKELELKYQNSEEKARNLKHSVDELQKRVNQSENSVPPPPPPPPPLPPPPPNPIRSLMSMIRKRSHPSGSGAKKEKATQPETTEEVTDLKRQAVEEMMDRIKKGVHLRPVNQTARPKTKPESSKGCESAVDELKGILASQ

SEQ ID NO: 35673 - protein, 498 aa, Homo sapiens
  REGION 1..498: note = ENSP00000376635
MVIEEVNFMQNHLEIEKTCRESAEALATKLNKENKTLKRISMLYMAKLGPDVITEEINIDDEDSTTDTDGAAETCVSVQCQKQIKELRDQIVSVQEEKKILAIELENLKSKLVEVIEEVNKVKQEKTVLNSEVLEQRKVLEKCNRVSMLAVEEYEEMQVNLELEKDLRKKAESFAQEMFIEQNKLKRQSHLLLQSSIPDQQLLKALDENAKLTQQLEEERIQHQQKVKELEEQLENETLHKEIHNLKQQLELLEEDKKELELKYQNSEEKARNLKHSVDELQKRVNQSENSVPPPPPPPPPLPPPPPNPIRSLMSMIRKRSHPSGSGAKKEKATQPETTEEVTDLKRQAVEEMMDRIKKGVHLRPVNQTARPKTKPESSKGCESAVDELKGILGTLNKSTSSRSLKSLDPENSETELERILRRRKVTAEADSSSPTGILATSESKSMPVLGSVSSVTKTALNKKTLEAEFNSPSPPTPEPGEGPRKLEGCTSSKVTFQ

SEQ ID NO: 35674 - protein, 571 aa, Homo sapiens
  REGION 1..571: note = ENSP00000260777
MVIEEVNFMQNHLEIEKTCRESAEALATKLNKENKTLKRISMLYMAKLGPDVITEEINIDDEDSTTDTDGAAETCVSVQCQKQIKELRDQIVSVQEEKKILAIELENLKSKLVEVIEEVNKVKQEKTVLNSEVLEQRKVLEKCNRVSMLAVEEYEEMQVNLELEKDLRKKAESFAQEMFIEQNKLKRQSHLLLQSSIPDQQLLKALDENAKLTQQLEEERIQHQQKVKELEEQLENETLHKEIHNLKQQLELLEEDKKELELKYQNSEEKARNLKHSVDELQKRVNQSENSVPPPPPPPPPLPPPPPNPIRSLMSMIRKRSHPSGSGAKKEKATQPETTEEVTDLKRQAVEEMMDRIKKGVHLRPVNQTARPKTKPESSKGCESAVDELKGILGTLNKSTSSRSLKSLDPENSETELERILRRRKVTAEADSSSPTGILATSESKSMPVLGSVSSVTKTALNKKTLEAEFNSPSPPTPEPGEGPRKLEGCTSSKVTFQPPSSIGCRKKYIDGEKQAEPVVVLDPVSTHEPQTKDQVAEKDPTQHKEDEGEIQPENKEDSIENVRETDSSNC

SEQ ID NO: 35675 - protein, 558 aa, Homo sapiens
  REGION 1..558: note = ENSP00000376636
MNSSDEEKQLQLITSLKEQAIGEYEDLRAENQKTKEKCDKIRQERDEAVKKLEEFQKISHMVIEEVNFMQNHLEIEKTCRESAEALATKLNKENKTLKRISMLYMAKLGPDVITEEINIDDEDSTTDTDGAAETCVSVQCQKQIKELRDQIVSVQEEKKILAIELENLKSKLVEVIEEVNKVKQEKTVLNSEVLEQRKVLEKCNRVSMLAVEEYEEMQVNLELEKDLRKKAESFAQEMFIEQNKLKRQSHLLLQSSIPDQQLLKALDENAKLTQQLEEERIQHQQKVKELEEQLENETLHKEIHNLKQQLELLEEDKKELELKYQNSEEKARNLKHSVDELQKRVNQSENSVPPPPPPPPPLPPPPPNPIRSLMSMIRKRSHPSGSGAKKEKATQPETTEEVTDLKRQAVEEMMDRIKKGVHLRPVNQTARPKTKPESSKGCESAVDELKGILGTLNKSTSSRSLKSLDPENSETELERILRRRKVTAEADSSSPTGILATSESKSMPVLGSVSSVTKTALNKKTLEAEFNSPSPPTPEPGEGPRKLEGCTSSKVTFQ

SEQ ID NO: 35676 - protein, 631 aa, Homo sapiens
  REGION 1..631: note = ENSP00000347532
MNSSDEEKQLQLITSLKEQAIGEYEDLRAENQKTKEKCDKIRQERDEAVKKLEEFQKISHMVIEEVNFMQNHLEIEKTCRESAEALATKLNKENKTLKRISMLYMAKLGPDVITEEINIDDEDSTTDTDGAAETCVSVQCQKQIKELRDQIVSVQEEKKILAIELENLKSKLVEVIEEVNKVKQEKTVLNSEVLEQRKVLEKCNRVSMLAVEEYEEMQVNLELEKDLRKKAESFAQEMFIEQNKLKRQSHLLLQSSIPDQQLLKALDENAKLTQQLEEERIQHQQKVKELEEQLENETLHKEIHNLKQQLELLEEDKKELELKYQNSEEKARNLKHSVDELQKRVNQSENSVPPPPPPPPPLPPPPPNPIRSLMSMIRKRSHPSGSGAKKEKATQPETTEEVTDLKRQAVEEMMDRIKKGVHLRPVNQTARPKTKPESSKGCESAVDELKGILGTLNKSTSSRSLKSLDPENSETELERILRRRKVTAEADSSSPTGILATSESKSMPVLGSVSSVTKTALNKKTLEAEFNSPSPPTPEPGEGPRKLEGCTSSKVTFQPPSSIGCRKKYIDGEKQAEPVVVLDPVSTHEPQTKDQVAEKDPTQHKEDEGEIQPENKEDSIENVRETDSSNC

SEQ ID NO: 35677 - protein, 324 aa, Homo sapiens
  REGION 1..324: note = ENSP00000322457
MSRPSSTGPSANKPCSKQPPPQPQHTPSPAAPPAAATISAAGPGSSAVPAAAAVISGPGGGGGAGPVSPQHHELTSLFECPVCFDYVLPPILQCQAGHLVCNQCRQKLSCCPTCRGALTPSIRNLAMEKVASAVLFPCKYATTGCSLTLHHTEKPEHEDICEYRPYSCPCPGASCKWQGSLEAVMSHLMHAHKSITTLQGEDIVFLATDINLPGAVDWVMMQSCFGHHFMLVLEKQEKYEGHQQFFAIVLLIGTRKQAENFAYRLELNGNRRRLTWEATPRSIHDGVAAAIMNSDCLVFDTAIAHLFADNGNLGINVTISTCCP

SEQ ID NO: 35678 - protein, 83 aa, Homo sapiens
  REGION 1..83: note = ENSP00000417619
MEKVASAVLFPCKYATTGCSLTLHHTEKPEHEDICEYRPYSCPCPGASCKWQGSLEAVMSHLMHAHKSITTLQGEDIVFLATD

SEQ ID NO: 35679 - protein, 269 aa, Homo sapiens
  REGION 1..269: note = ENSP00000383256
MLFFTQCFGAVLDLIHLRFQHYKAKRVFSAAGQLVCVVNPTHNLKYVSSRRAVTQSAPEQGSFHPHHLSHHHCHHRHHHHLRHHAHPHHLHHQEAGLHANPVTPCLCMCPLFSCQWEGRLEVVVPHLRQIHRVDILQGAEIVFLATDMHLPAPADWIIMHSCLGHHFLLVLRKQERHEGHPQFFATMMLIGTPTQADCFTYRLELNRNHRRLKWEATPRSVLECVDSVITDGDCLVLNTSLAQLFSDNGSLAIGIAITATEVLPSEAEM

SEQ ID NO: 35680 - protein, 827 aa, Homo sapiens
  REGION 1..827: note = ENSP00000264852
MRGCLRLALLCALPWLLLAASPGHPAKSPRQPPAPRRDPFDAARGADFDHVYSGVVNLSTENIYSFNYTSQPDQVTAVRVYVNSSSENLNYPVLVVVRQQKEVLSWQVPLLFQGLYQRSYNYQEVSRTLCPSEATNETGPLQQLIFVDVASMAPLGAQYKLLVTKLKHFQLRTNVAFHFTASPSQPQYFLYKFPKDVDSVIIKVVSEMAYPCSVVSVQNIMCPVYDLDHNVEFNGVYQSMTKKAAITLQKKDFPGEQFFVVFVIKPEDYACGGSFFIQEKENQTWNLQRKKNLEVTIVPSIKESVYVKSSLFSVFIFLSFYLGCLLVGFVHYLRFQRKSIDGSFGSNDGSGNMVASHPIAASTPEGSNYGTIDESSSSPGRQMSSSDGGPPGQSDTDSSVEESDFDTMPDIESDKNIIRTKMFLYLSDLSRKDRRIVSKKYKIYFWNIITIAVFYALPVIQLVITYQTVVNVTGNQDICYYNFLCAHPLGVLSAFNNILSNLGHVLLGFLFLLIVLRRDILHRRALEAKDIFAVEYGIPKHFGLFYAMGIALMMEGVLSACYHVCPNYSNFQFDTSFMYMIAGLCMLKLYQTRHPDINASAYSAYASFAVVIMVTVLGVVFGKNDVWFWVIFSAIHVLASLALSTQIYYMGRFKIDLGIFRRAAMVFYTDCIQQCSRPLYMDRMVLLVVGNLVNWSFALFGLIYRPRDFASYMLGIFICNLLLYLAFYIIMKLRSSEKVLPVPLFCIVATAVMWAAALYFFFQNLSSWEGTPAESREKNRECILLDFFDDHDIWHFLSATALFFSFLVLLTLDDDLDVVRRDQIPVF

SEQ ID NO: 35681 - protein, 832 aa, Homo sapiens
  REGION 1..832: note = ENSP00000377416
MRGCLRLALLCALPWLLLAASPGHPAKSPRQPPAPRRDPFDAARGADFDHVYSGVVNLSTENIYSFNYTSQPDQVTAVRVYVNSSSENLNYPVLVVVRQQKEVLSWQVPLLFQGLYQRSYNYQEVSRTLCPSEATNETGPLQQLIFVDVASMAPLGAQYKLLVTKLKHFQLRTNVAFHFTASPSQPQYFLYKFPKDVDSVIIKVVSEMAYPCSVVSVQNIMCPVYDLDHNVEFNGVYQSMTKKAAITLQKKDFPGEQFFVVFVIKPEDYACGGSFFIQEKENQTWNLQRKKNLEVTIVPSIKESVYVKSSLFSVFIFLSFYLGCLLVGFVHYLRFQRKSIDGSFGSNDGSGNMVASHPIAASTPEGSNYGTIDESSSSPGRQMSSSDGGPPGQSDTDSSVEESDFDTMPDIESDKNIIRTKMFLYLSDLSRKDRRIVSKKYKIYFWNIITIAVFYALPVIQLVITYQTVVNVTGNQDICYYNFLCAHPLGVLSAFNNILSNLGHVLLGFLFLLIVLRRDILHRRALEAKDIFAVEYGIPKHFGLFYAMGIALMMEGVLSACYHVCPNYSNFQFDTSFMYMIAGLCMLKLYQTRHPDINASAYSAYASFAVVIMVTVLGVVFGKNDVWFWVIFSAIHVLASLALSTQIYYMGRFKIDVSDTDLGIFRRAAMVFYTDCIQQCSRPLYMDRMVLLVVGNLVNWSFALFGLIYRPRDFASYMLGIFICNLLLYLAFYIIMKLRSSEKVLPVPLFCIVATAVMWAAALYFFFQNLSSWEGTPAESREKNRECILLDFFDDHDIWHFLSATALFFSFLVLLTLDDDLDVVRRDQIPVF

SEQ ID NO: 35682 - protein, 1363 aa, Homo sapiens
  REGION 1..1363: note = ENSP00000391295
  VARIANT 1: note = Any amino acid
XGAGGAAGAGTGGAGPAGRLLPPPAPGSPAAPAAVSPAAGQPRPPAPASRGPMPARIGYYEIDRTIGKGNFAVVKRATHLVTKAKVAIKIIDKTQLDEENLKKIFREVQIMKMLCHPHIIRLYQVMETERMIYLVTEYASGGEIFDHLVAHGRMAEKEARRKFKQIVTAVYFCHCRNIVHRDLKAENLLLDANLNIKIADFGFSNLFTPGQLLKTWCGSPPYAAPELFEGKEYDGPKVDIWSLGVVLYVLVCGALPFDGSTLQNLRARVLSGKFRIPFFMSTECEHLIRHMLVLDPNKRLSMEQICKHKWMKLGDADPNFDRLIAECQQLKEERQVDPLNEDVLLAMEDMGLDKEQTLQSLRSDAYDHYSAIYSLLCDRHKRHKTLRLGALPSMPRALAFQAPVNIQAEQAGTAMNISVPQVQLINPENQIVEPDGTLNLDSDEGEEPSPEALVRYLSMRRHTVGVADPRTEVMEDLQKLLPGFPGVNPQAPFLQVAPNVNFMHNLLPMQNLQPTGQLEYKEQSLLQPPTLQLLNGMGPLGRRASDGGANIQLHAQQLLKRPRGPSPLVTMTPAVPAVTPVDEESSDGEPDQEAVQRYLANRSKRHTLAMTNPTAEIPPDLQRQLGQQPFRSRVWPPHLVPDQHRSTYKDSNTLHLPTERFSPVRRFSDGAASIQAFKAHLEKMGNNSSIKQLQQECEQLQKMYGGQIDERTLEKTQQQHMLYQQEQHHQILQQQIQDSICPPQPSPPLQAACENQPALLTHQLQRLRIQPSSPPPNHPNNHLFRQPSNSPPPMSSAMIQPHGAASSSQFQGLPSRSAIFQQQPENCSSPPNVALTCLGMQQPAQSQQVTIQVQEPVDMLSNMPGTAAGSSGRGISISPSAGQMQMQHRTNLMATLSYGHRPLSKQLSADSAEAHSLNVNRFSPANYDQAHLHPHLFSDQSRGSPSSYSPSTGVGFSPTQALKVPPLDQFPTFPPSAHQQPPHYTTSALQQALLSPTPPDYTRHQQVPHILQGLLSPRHSLTGHSDIRLPPTEFAQLIKRQQQQRQQQQQQQQQQEYQELFRHMNQGDAGSLAPSLGGQSMTERQALSYQNADSYHHHTSPQHLLQIRAQECVSQASSPTPPHGYAHQPALMHSESMEEDCSCEGAKDGFQDSKSSSTLTKGCHDSPLLLSTGGPGDPESLLGTVSHAQELGIHPYGHQPTAAFSKNKVPSREPVIGNCMDRSSPGQAVELPDHNGLGYPARPSVHEHHRPRALQRHHTIQNSDDAYVQLDNLPGMSLVAGKALSSARMSDAVLSQSSLMGSQQFQDGENEECGASLGGHEHPDLSDGSQHLNSSCYPSTCITDILLSYKHPEVSFSMEQAGV

SEQ ID NO: 35683 - protein, 1321 aa, Homo sapiens
  REGION 1..1321: note = ENSP00000364449
MAAAAASGAGGAAGAGTGGAGPAGRLLPPPAPGSPAAPAAVSPAAGQPRPPAPASRGPMPARIGYYEIDRTIGKGNFAVVKRATHLVTKAKVAIKIIDKTQLDEENLKKIFREVQIMKMLCHPHIIRLYQVMETERMIYLVTEYASGGEIFDHLVAHGRMAEKEARRKFKQIVTAVYFCHCRNIVHRDLKAENLLLDANLNIKIADFGFSNLFTPGQLLKTWCGSPPYAAPELFEGKEYDGPKVDIWSLGVVLYVLVCGALPFDGSTLQNLRARVLSGKFRIPFFMSTECEHLIRHMLVLDPNKRLSMEQICKHKWMKLGDADPNFDRLIAECQQLKEERQVDPLNEDVLLAMEDMGLDKEQTLQSLRSDAYDHYSAIYSLLCDRHKRHKTLRLGALPSMPRALAFQAPVNIQAEQAGTAMNISVPQVQLINPENQIVEPDGTLNLDSDEGEEPSPEALVRYLSMRRHTVGVADPRTEVMEDLQKLLPGFPGVNPQAPFLQVAPNVNFMHNLLPMQNLQPTGQLEYKEQSLLQPPTLQLLNGMGPLGRRASDGGANIQLHAQQLLKRPRGPSPLVTMTPAVPAVTPVDEESSDGEPDQEAVQSSTYKDSNTLHLPTERFSPVRRFSDGAASIQAFKAHLEKMGNNSSIKQLQQECEQLQKMYGGQIDERTLEKTQQQHMLYQQEQHHQILQQQIQDSICPPQPSPPLQAACENQPALLTHQLQRLRIQPSSPPPNHPNNHLFRQPSNSPPPMSSAMIQPHGAASSSQFQGLPSRSAIFQQQPENCSSPPNVALTCLGMQQPAQSQQVTIQVQEPVDMLSNMPGTAAGSSGRGISISPSAGQMQMQHRTNLMATLSYGHRPLSKQLSADSAEAHSLNVNRFSPANYDQAHLHPHLFSDQSRGSPSSYSPSTGVGFSPTQALKVPPLDQFPTFPPSAHQQPPHYTTSALQQALLSPTPPDYTRHQQVPHILQGLLSPRHSLTGHSDIRLPPTEFAQLIKRQQQQRQQQQQQQQQQEYQELFRHMNQGDAGSLAPSLGGQSMTERQALSYQNADSYHHHTSPQHLLQIRAQECVSQASSPTPPHGYAHQPALMHSESMEEDCSCEGAKDGFQDSKSSSTLTKGCHDSPLLLSTGGPGDPESLLGTVSHAQELGIHPYGHQPTAAFSKNKVPSREPVIGNCMDRSSPGQAVELPDHNGLGYPARPSVHEHHRPRALQRHHTIQNSDDAYVQLDNLPGMSLVAGKALSSARMSDAVLSQSSLMGSQQFQDGENEECGASLGGHEHPDLSDGSQHLNSSCYPSTCITDILLSYKHPEVSFSMEQAGV

SEQ ID NO: 35684 - protein, 71 aa, Homo sapiens
  REGION 1..71: note = ENSP00000392849
  VARIANT 1: note = Any amino acid
XNSDDAYVQLDNLPGMSLVAGKALSSARMSDAVLSQSSLMGSQQFQDGENEDILLSYKHPEVSFSMEQAGV

SEQ ID NO: 35685 - protein, 151 aa, Homo sapiens
  REGION 1..151: note = ENSP00000392761
RPPAPASRGPMPARIGYYEIDRTIGKGNFAVVKRATHLVTKAKVAIKIIDKTQLDEENLKKIFREVQIMKMLCHPHIIRLYQVMETERMIYLVTEYASGGEIFGGFGHQQFSFCPELPIAESWRSAVKRWGPLLLLSPHLWNLIRPPGGPW

SEQ ID NO: 35686 - protein, 1261 aa, Homo sapiens
  REGION 1..1261: note = ENSP00000390442
MAAAAASGAGGAAGAGTGGAGPAGRLLPPPAPGSPAAPAAVSPAAGQPRPPAPASRGPMPARIGYYEIDRTIGKGNFAVVKRATHLVTKAKVAIKIIDKTQLDEENLKKIFREVQIMKMLCHPHIIRLYQVMETERMIYLVTEYASGGEIFDHLVAHGRMAEKEARRKFKQIVTAVYFCHCRNIVHRDLKAENLLLDANLNIKIADFGFSNLFTPGQLLKTWCGSPPYAAPELFEGKEYDGPKVDIWSLGVVLYVLVCGALPFDGSTLQNLRARVLSGKFRIPFFMSTECEHLIRHMLVLDPNKRLSMEQICKHKWMKLGDADPNFDRLIAECQQLKEERQVDPLNEDVLLAMEDMGLDKEQTLQAEQAGTAMNISVPQVQLINPENQIVEPDGTLNLDSDEGEEPSPEALVRYLSMRRHTVGVADPRTEVMEDLQKLLPGFPGVNPQAPFLQVAPNVNFMHNLLPMQNLQPTGQLEYKEQSLLQPPTLQLLNGMGPLGRRASDGGANIQLHAQQLLKRPRGPSPLVTMTPAVPAVTPVDEESSDGEPDQEAVQRYLANRSKRHTLAMTNPTAEIPPDLQRQLGQQPFRSRVWPPHLVPDQHRSTYKDSNTLHLPTERFSPVRRFSDGAASIQAFKAHLEKMGNNSSIKQLQQECEQLQKMYGGQIDERTLEKTQQQHMLYQQEQHHQILQQQIQDSICPPQPSPPLQAACENQPALLTHQLQRLRIQPSSPPPNHPNNHLFRQPSNSPPPMSSAMIQPHGAASSSQFQGLPSRSAIFQQQPENCSSPPNVALTCLGMQQPAQSQQVTIQVQEPVDMLSNMPGTAAGSSGRGISISPSAGQMQMQHRTNLMATLSYGHRPLSKQLSADSAEAHSAHQQPPHYTTSALQQALLSPTPPDYTRHQQVPHILQGLLSPRHSLTGHSDIRLPPTEFAQLIKRQQQQRQQQQQQQQQQEYQELFRHMNQGDAGSLAPSLGGQSMTERQALSYQNADSYHHHTSPQHLLQIRAQECVSQASSPTPPHGYAHQPALMHSESMEEDCSCEGAKDGFQDSKSSSTLTKGCHDSPLLLSTGGPGDPESLLGTVSHAQELGIHPYGHQPTAAFSKNKVPSREPVIGNCMDRSSPGQAVELPDHNGLGYPARPSVHEHHRPRALQRHHTIQNSDDAYVQLDNLPGMSLVAGKALSSARMSDAVLSQSSLMGSQQFQDGENEECGASLGGHEHPDLSDGSQHLNSSCYPSTCITDILLSYKHPEVSFSMEQAGV

SEQ ID NO: 35687 - protein, 506 aa, Homo sapiens
  REGION 1..506: note = ENSP00000414347
  VARIANT 1: note = Any amino acid
XKTQLDEENLKKIFREVQIMKMLCHPHIIRLYQVMETERMIYLVTEYASGGEIFDHLVAHGRMAEKEARRKFKQIVTAVYFCHCRNIVHRDLKAENLLLDANLNIKIADFGFSNLFTPGQLLKTWCGSPPYAAPELFEGKEYDGPKVDIWSLGVVLYVLVCGALPFDGSTLQNLRARVLSGKFRIPFFMSTECEHLIRHMLVLDPNKRLSMEQICKHKWMKLGDADPNFDRLIAECQQLKEERQVDPLNEDVLLAMEDMGLDKEQTLQSLRSDAYDHYSAIYSLLCDRHKRHKTLRLGALPSMPRALAFQAPVNIQAEQAGTAMNISVPQVQLINPENQIVEPDGTLNLDSDEGEEPSPEALVRYLSMRRHTVGVADPRTEVMEDLQKLLPGFPGVNPQAPFLQVAPNVNFMHNLLPMQNLQPTGQLEYKEQSLLQPPTLQLLNGMGPLGRRASDGGANIQLHAQQLLKRPRGPSPLVTMTPAVPAVTPVDEESSDGEPDQEAVQR

SEQ ID NO: 35688 - protein, 32 aa, Homo sapiens
  REGION 1..32: note = ENSP00000452080
MTSLKRSQTERPLATDRASVVGTDGTPKVHTD

SEQ ID NO: 35689 - protein, 1783 aa, Homo sapiens
  REGION 1..1783: note = ENSP00000370630
MTSLKRSQTERPLATDRASVVGTDGTPKVHTDDFYMRRFRSQNGSLGSSVMAPVGPPRSEGSHHITSTPGVPKMGVRARIADWPPRKENIKESSRSSQEIETSSCLDSLSSKSSPVSQGSSVSLNSNDSAMLKSIQNTLKNKTRPSENMDSRFLMPEAYPSSPRKALRRIRQRSNSDITISELDVDSFDECISPTYKTGPSLHREYGSTSSIDKQGTSGESFFDLLKGYKDDKSDRGPTPTKLSDFLITGGGKGSGFSLDVIDGPISQRENLRLFKEREKPLKRRSKSETGDSSIFRKLRNAKGEELGKSSDLEDNRSEDSVRPWTCPKCFAHYDVQSILFDLNEAIMNRHNVIKRRNTTTGASAAAVASLVSGPLSHSASFSSPMGSTEDLNSKGSLSMDQGDDKSNELVMSCPYFRNEIGGEGERKISLSKSNSGSFSGCESASFESTLSSHCTNAGVAVLEVPKENLVLHLDRVKRYIVEHVDLGAYYYRKFFYQKEHWNYFGADENLGPVAVSIRREKPDEMKENGSPYNYRIIFRTSELMTLRGSVLEDAIPSTAKHSTARGLPLKEVLEHVVPELNVQCLRLAFNTPKVTEQLMKLDEQGLNYQQKVGIMYCKAGQSTEEEMYNNESAGPAFEEFLQLLGERVRLKGFEKYRAQLDTKTDSTGTHSLYTTYKDYEIMFHVSTMLPYTPNNKQQLLRKRHIGNDIVTIVFQEPGAQPFSPKNIRSHFQHVFVIVRVHNPCSDSVCYSVAVTRSRDVPSFGPPIPKGVTFPKSNVFRDFLLAKVINAENAAHKSEKFRAMATRTRQEYLKDLAEKNVTNTPIDPSGKFPFISLASKKKEKSKPYPGAELSSMGAIVWAVRAEDYNKAMELDCLLGISNEFIVLIEQETKSVVFNCSCRDVIGWTSTDTSLKIFYERGECVSVGSFINIEEIKEIVKRLQFVSKGCESVEMTLRRNGLGQLGFHVNYEGIVADVEPYGYAWQAGLRQGSRLVEICKVAVATLSHEQMIDLLRTSVTVKVVIIPPHDDCTPRRSCSETYRMPVMEYKMNEGVSYEFKFPFRNNNKWQRNASKGPHSPQVPSQVQSPMTSRLNAGKGDGKMPPPERAANIPRSISSDGRPLERRLSPGSDIYVTVSSMALARSQCRNSPSNLSSSSDTGSVGGTYRQKSMPEGFGVSRRSPASIDRQNTQSDIGGSGKSTPSWQRSEDSIADQMEPTCHLPAVSKVLPAFRESPSGRLMRQDPVVHLSPNKQGHSDSHYSSHSSSNTLSSNASSAHSDEKWYDGDRTESELNSYNYLQGTSADSGIDTTSYGPSHGSTASLGAATSSPRSGPGKEKVAPLWHSSSEVISMADRTLETESHGLDRKTESSLSLDIHSKSQAGSTPLTRENSTFSINDAASHTSTMSSRHSASPVVFTSARSSPKEELHPAAPSQLAPSFSSSSSSSSGPRSFYPRQGATSKYLIGWKKPEGTINSVGFMDTRKRHQSDGNEIAHTRLRASTRDLRASPKPTSKSTIEEDLKKLIDLESPTPESQKSFKFHALSSPQSPFPSTPTSRRALHRTLSDESIYNSQREHFFTSRASLLDQALPNDVLFSSTYPSLPKSLPLRRPSYTLGMKSLHGEFSASDSSLTDIQETRRQPMPDPGLMPLPDTAADLDWSNLVDAAKAYEVQRASFFAASDENHRPLSAASNSDQLEDQALAQMKPYSSSKDSSPTLASKVDQLEGMLKMLREDLKKEKEDKAHLQAEVQHLREDNLRLQEESQNASDKLKKFTEWVFNTIDMS

SEQ ID NO: 35690 - protein, 1804 aa, Homo sapiens
  REGION 1..1804: note = ENSP00000450832
MTSLKRSQTERPLATDRASVVGTDGTPKVHTDDFYMRRFRSQNGSLGSSVMAPVGPPRSEGSHHITSTPGVPKMGVRARIADWPPRKENIKESSRSSQEIETSSCLDSLSSKSSPVSQGSSVSLNSNDSAMLKSIQNTLKNKTRPSENMDSRFLMPEAYPSSPRKALRRIRQRSNSDITISELDVDSFDECISPTYKTGPSLHREYGSTSSIDKQGTSGESFFDLLKGYKDDKSDRGPTPTKLSDFLITGGGKGSGFSLDVIDGPISQRENLRLFKEREKPLKRRSKSETGDSSIFRKLRNAKGEELGKSSDLEDNRSEDSVRPWTCPKCFAHYDVQSILFDLNEAIMNRHNVIKRRNTTTGASAAAVASLVSGPLSHSASFSSPMGSTEDLNSKGSLSMDQGDDKSNELVMSCPYFRNEIGGEGERKISLSKSNSGSFSGCESASFESTLSSHCTNAGVAVLEVPKENLVLHLDRVKRYIVEHVDLGAYYYRKFFYQKEHWNYFGADENLGPVAVSIRREKPDEMKENGSPYNYRIIFRTSELMTLRGSVLEDAIPSTAKHSTARGLPLKEVLEHVVPELNVQCLRLAFNTPKVTEQLMKLDEQGLNYQQKVGIMYCKAGQSTEEEMYNNESAGPAFEEFLQLLGERVRLKGFEKYRAQLDTKTDSTGTHSLYTTYKDYEIMFHVSTMLPYTPNNKQQLLRKRHIGNDIVTIVFQEPGAQPFSPKNIRSHFQHVFVIVRVHNPCSDSVCYSVAVTRSRDVPSFGPPIPKGVTFPKSNVFRDFLLAKVINAENAAHKSEKFRAMATRTRQEYLKDLAEKNVTNTPIDPSGKFPFISLASKKKEKSKPYPGAELSSMGAIVWAVRAEDYNKAMELDCLLGISNEFIVLIEQETKSVVFNCSCRDVIGWTSTDTSLKIFYERGECVSVGSFINIEEIKEIVKRLQFVSKGCESVEMTLRRNGLGQLGFHVNYEGIVADVEPYGYAWQAGLRQGSRLVEICKVAVATLSHEQMIDLLRTSVTVKVVIIPPHDDCTPRRSCSETYRMPVMEYKMNEGVSYEFKFPFRNNNKWQRNASKGPHSPQVPSQVQSPMTSRLNAGKGDGKMPPPERAANIPRSISSDGRPLERRLSPGSDIYVTVSSMALARSQCRNSPSNLSSSSDTGSVGGTYRQKSMPEGFGVSRRSPASIDRQNTQSDIGGSGKSTPSWQRSEDSIADQMAYSYRGPQDFNSFVLEQHEYTEPTCHLPAVSKVLPAFRESPSGRLMRQDPVVHLSPNKQGHSDSHYSSHSSSNTLSSNASSAHSDEKWYDGDRTESELNSYNYLQGTSADSGIDTTSYGPSHGSTASLGAATSSPRSGPGKEKVAPLWHSSSEVISMADRTLETESHGLDRKTESSLSLDIHSKSQAGSTPLTRENSTFSINDAASHTSTMSSRHSASPVVFTSARSSPKEELHPAAPSQLAPSFSSSSSSSSGPRSFYPRQGATSKYLIGWKKPEGTINSVGFMDTRKRHQSDGNEIAHTRLRASTRDLRASPKPTSKSTIEEDLKKLIDLESPTPESQKSFKFHALSSPQSPFPSTPTSRRALHRTLSDESIYNSQREHFFTSRASLLDQALPNDVLFSSTYPSLPKSLPLRRPSYTLGMKSLHGEFSASDSSLTDIQETRRQPMPDPGLMPLPDTAADLDWSNLVDAAKAYEVQRASFFAASDENHRPLSAASNSDQLEDQALAQMKPYSSSKDSSPTLASKVDQLEGMLKMLREDLKKEKEDKAHLQAEVQHLREDNLRLQEESQNASDKLKKFTEWVFNTIDMS

SEQ ID NO: 35691 - protein, 1782 aa, Homo sapiens
  REGION 1..1782: note = ENSP00000351352
MTSLKRSQTERPLATDRASVVGTDGTPKVHTDDFYMRRFRSQNGSLGSSVMAPVGPPRSEGSHHITSTPGVPKMGVRARIADWPPRKENIKESSRSSQEIETSSCLDSLSSKSSPVSQGSSVSLNSNDSAMLKSIQNTLKNKTRPSENMDSRFLMPEAYPSSPRKALRRIRQRSNSDITISELDVDSFDECISPTYKTGPSLHREYGSTSSIDKQGTSGESFFDLLKGYKDDKSDRGPTPTKLSDFLITGGGKGSGFSLDVIDGPISQRENLRLFKEREKPLKRRSKSETGDSSIFRKLRNAKGEELGKSSDLEDNRSEDSVRPWTCPKCFAHYDVQSILFDLNEAIMNRHNVIKRRNTTTGASAAAVASLVSGPLSHSASFSSPMGSTEDLNSKGSLSMDQGDDKSNELVMSCPYFRNEIGGEGERKISLSKSNSGSFSGCESASFESTLSSHCTNAGVAVLEVPKENLVLHLDRVKRYIVEHVDLGAYYYRKFFYQKEHWNYFGADENLGPVAVSIRREKPDEMKENGSPYNYRIIFRTSELMTLRGSVLEDAIPSTAKHSTARGLPLKEVLEHVVPELNVQCLRLAFNTPKVTEQLMKLDEQGLNYQQKVGIMYCKAGQSTEEEMYNNESAGPAFEEFLQLLGERVRLKGFEKYRAQLDTKTDSTGTHSLYTTYKDYEIMFHVSTMLPYTPNNKQQLLRKRHIGNDIVTIVFQEPGAQPFSPKNIRSHFQHVFVIVRVHNPCSDSVCYSVAVTRSRDVPSFGPPIPKGVTFPKSNVFRDFLLAKVINAENAAHKSEKFRAMATRTRQEYLKDLAEKNVTNTPIDPSGKFPFISLASKKKEKSKPYPGAELSSMGAIVWAVRAEDYNKAMELDCLLGISNEFIVLIEQETKSVVFNCSCRDVIGWTSTDTSLKIFYERGECVSVGSFINIEEIKEIVKRLQFVSKGCESVEMTLRRNGLGQLGFHVNYEGIVADVEPYGYAWQAGLRQGSRLVEICKVAVATLSHEQMIDLLRTSVTVKVVIIPPHDDCTPRRSCSETYRMPVMEYKMNEGVSYEFKFPFRNNNKWQRNASKGPHSPQVPSQVQSPMTSRLNAGKGDGKMPPPERAANIPRSISSDGRPLERRLSPGSDIYVTVSSMALARSQCRNSPSNLSSSSDTGSVGGTYRQKSMPEGFGVSRRSPASIDRQNTQSDIGGSGKSTPSWQRSEDSIADQMEPTCHLPAVSKVLPAFRESPSGRLMRQDPVVHLSPNKQGHSDSHYSSHSSSNTLSSNASSAHSDEKWYDGDRTESELNSYNYLQGTSADSGIDTTSYGPSHGSTASLGAATSSPRSGPGKEKVAPLWHSSSEVISMADRTLETESHGLDRKTESSLSLDIHSKSQAGSTPLTRENSTFSINDAASHTSTMSSRHSASPVVFTSARSSPKEELHPAAPSQLAPSFSSSSSSSSGPRSFYPRQGATSKYLIGWKKPEGTINSVGFMDTRKRHQSDGNEIAHTRLRASTRDLRASPKPTSKSTIEEDLKKLIDLESPTPESQKSFKFHALSSPQSPFPSTPTSRRALHRTLSDESIYNSQREHFFTSRASLLDQALPNDVLFSSTYPSLPKSLPLRRPSYTLGMKSLHGEFSASDSSLTDIQETRRQPMPDPGLMPLPDTAADLDWSNLVDAAKAYEVQRASFFAASDENHRPLSAASNSDQLEDQALAQMKPYSSKDSSPTLASKVDQLEGMLKMLREDLKKEKEDKAHLQAEVQHLREDNLRLQEESQNASDKLKKFTEWVFNTIDMS

SEQ ID NO: 35692 - protein, 1257 aa, Homo sapiens
  REGION 1..1257: note = ENSP00000440682
MKENGSPYNYRIIFRTSELMTLRGSVLEDAIPSTAKHSTARGLPLKEVLEHVVPELNVQCLRLAFNTPKVTEQLMKLDEQGLNYQQKVGIMYCKAGQSTEEEMYNNESAGPAFEEFLQLLGERVRLKGFEKYRAQLDTKTDSTGTHSLYTTYKDYEIMFHVSTMLPYTPNNKQQLLRKRHIGNDIVTIVFQEPGAQPFSPKNIRSHFQHVFVIVRVHNPCSDSVCYSVAVTRSRDVPSFGPPIPKGVTFPKSNVFRDFLLAKVINAENAAHKSEKFRAMATRTRQEYLKDLAEKNVTNTPIDPSGKFPFISLASKKKEKSKPYPGAELSSMGAIVWAVRAEDYNKAMELDCLLGISNEFIVLIEQETKSVVFNCSCRDVIGWTSTDTSLKIFYERGECVSVGSFINIEEIKEIVKRLQFVSKGCESVEMTLRRNGLGQLGFHVNYEGIVADVEPYGYAWQAGLRQGSRLVEICKVAVATLSHEQMIDLLRTSVTVKVVIIPPHDDCTPRRSCSETYRMPVMEYKMNEGVSYEFKFPFRNNNKWQRNASKGPHSPQVPSQVQSPMTSRLNAGKGDGKMPPPERAANIPRSISSDGRPLERRLSPGSDIYVTVSSMALARSQCRNSPSNLSSSSDTGSVGGTYRQKSMPEGFGVSRRSPASIDRQNTQSDIGGSGKSTPSWQRSEDSIADQMEPTCHLPAVSKVLPAFRESPSGRLMRQDPVVHLSPNKQGHSDSHYSSHSSSNTLSSNASSAHSDEKWYDGDRTESELNSYNYLQGTSADSGIDTTSYGPSHGSTASLGAATSSPRSGPGKEKVAPLWHSSSEVISMADRTLETESHGLDRKTESSLSLDIHSKSQAGSTPLTRENSTFSINDAASHTSTMSSRHSASPVVFTSARSSPKEELHPAAPSQLAPSFSSSSSSSSGPRSFYPRQGATSKYLIGWKKPEGTINSVGFMDTRKRHQSDGNEIAHTRLRASTRDLRASPKPTSKSTIEEDLKKLIDLESPTPESQKSFKFHALSSPQSPFPSTPTSRRALHRTLSDESIYNSQREHFFTSRASLLDQALPNDVLFSSTYPSLPKSLPLRRPSYTLGMKSLHGEFSASDSSLTDIQETRRQPMPDPGLMPLPDTAADLDWSNLVDAAKAYEVQRASFFAASDENHRPLSAASNSDQLEDQALAQMKPYSSKDSSPTLASKVDQLEGMLKMLREDLKKEKEDKAHLQAEVQHLREDNLRLQEESQNASDKLKKFTEWVFNTIDMS

SEQ ID NO: 35693 - protein, 261 aa, Homo sapiens
  REGION 1..261: note = ENSP00000452450
EHWNYFGADENLGPVAVSIRREKPDEMKENGSPYNYRIIFRTSELMTLRGSVLEDAIPSTAKHSTARGLPLKEVLEHVVPELNVQCLRLAFNTPKVTEQLMKLDEQGWICLYLYASYYLPSQLNYQQKVGIMYCKAGQSTEEEMYNNESAGPAFEEFLQLLGERVRLKGFEKYRAQLDTKTDSTGTHSLYTTYKDYEIMFHVSTMLPYTPNNKQQLLRKRHIGNDIVTIVFQEPGAQPFSPKNIRSHFQHVFVIVRVHNPC

SEQ ID NO: 35694 - protein, 1722 aa, Homo sapiens
  REGION 1..1722: note = ENSP00000355589
MSDPRQSQEEKHKLGRASSKFKDPPRIMQSDDYFARKFKAINGNMGPTTSLNASNSNETGGGGPANGTPAVPKMGVRARVSEWPPKKDCSKELTCKALWESRSQTSYESITSVLQNGQSDQSEGQQDEQLDLDFVEAKYTIGDIFVHSPQRGLHPIRQRSNSDVTISDIDAEDVLDQNAVNPNTGAALHREYGSTSSIDRQGLSGENFFAMLRGYRVENYDHKAMVPFGFPEFFRCDPAISPSLHAAAQISRGEFVRISGLDYVDSALLMGRDRDKPFKRRLKSESVETSLFRKLRTVKSEHETFKFTSELEESRLERGIRPWNCQRCFAHYDVQSILFNINEAMATRANVGKRKNITTGASAASQTQMPTGQTGNCESPLGSKEDLNSKENLDADEGDGKSNDLVLSCPYFRNETGGEGDRRIALSRANSSSFSSGESCSFESSLSSHCTNAGVSVLEVPRENQPIHREKVKRYIIEHIDLGAYYYRKFFYGKEHQNYFGIDENLGPVAVSIRREKVEDAKEKEGSQFNYRVAFRTSELTTLRGAILEDAIPSTARHGTARGLPLKEVLEYVIPELSIQCLRQASNSPKVSEQLLKLDEQGLSFQHKIGILYCKAGQSTEEEMYNNETAGPAFEEFLDLLGQRVRLKGFSKYRAQLDNKTDSTGTHSLYTTYKDYELMFHVSTLLPYMPNNRQQLLRKRHIGNDIVTIVFQEPGALPFTPKSIRSHFQHVFVIVKVHNPCTENVCYSVGVSRSKDVPPFGPPIPKGVTFPKSAVFRDFLLAKVINAENAAHKSEKFRAMATRTRQEYLKDLAENFVTTATVDTSVKFSFITLGAKKKEKVKPRKDAHLFSIGAIMWHVIARDFGQSADIECLLGISNEFIMLIEKDSKNVVFNCSCRDVIGWTSGLVSIKVFYERGECVLLSSVDNCAEDIREIVQRLVIVTRGCETVEMTLRRNGLGQLGFHVNFEGIVADVEPFGFAWKAGLRQGSRLVEICKVAVATLTHEQMIDLLRTSVTVKVVIIQPHDDGSPRRGCSELCRIPMVEYKLDSEGTPCEYKTPFRRNTTWHRVPTPALQPLSRASPIPGTPDRLPCQQLLQQAQAAIPRSTSFDRKLPDGTRSSPSNQSSSSDPGPGGSGPWRPQVGYDGCQSPLLLEHQGSGPLECDGAREREDTMEASRHPETKWHGPPSKVLGSYKERALQKDGSCKDSPNKLSHIGDKSCSSHSSSNTLSSNTSSNSDDKHFGSGDLMDPELLGLTYIKGASTDSGIDTAPCMPATILGPVHLAGSRSLIHSRAEQWADAADVSGPDDEPAKLYSVHGYASTISAGSAAEGSMGDLSEISSHSSGSHHSGSPSAHCSKSSGSLDSSKVYIVSHSSGQQVPGSMSKPYHRQGAVNKYVIGWKKSEGSPPPEEPEVTECPGMYSEMDVMSTATQHQTVVGDAVAETQHVLSKEDFLKLMLPDSPLVEEGRRKFSFYGNLSPRRSLYRTLSDESICSNRRGSSFGSSRSSVLDQALPNDILFSTTPPYHSTLPPRAHPAPSMGSLRNEFWFSDGSLSDKSKCADPGLMPLPDTATGLDWTHLVDAARAFEGLDSDEELGLLCHHTSYLDQRVASFCTLTDMQHGQDLEGAQELPLCVDPGSGKEFMDTTGERSPSPLTGKVNQLELILRQLQTDLRKEKQDKAVLQAEVQHLRQDNMRLQEESQTATAQLRKFTEWFFTTIDKKS

SEQ ID NO: 35695 - protein, 778 aa, Homo sapiens
  REGION 1..778: note = ENSP00000309102
MSPCFSFIGCKLCSIVTRGCETVEMTLRRNGLGQLGFHVNFEGIVADVEPFGFAWKAGLRQGSRLVEICKVAVATLTHEQMIDLLRTSVTVKVVIIQPHDDGSPRRGCSELCRIPMVEYKLDSEGTPCEYKTPFRRNTTWHRVPTPALQPLSRASPIPGTPDRLPCQQLLQQAQAAIPRSTSFDRKLPDGTRSSPSNQSSSSDPGPGGSGPWRPQVGYDGCQSPLLLEHQGSGPLECDGAREREDTMEASRHPETKWHGPPSKVLGSYKERALQKDGSCKDSPNKLSHIGDKSCSSHSSSNTLSSNTSSNSDDKHFGSGDLMDPELLGLTYIKGASTDSGIDTAPCMPATILGPVHLAGSRSLIHSRAEQWADAADVSGPDDEPAKLYSVHGYASTISAGSAAEGSMGDLSEISSHSSGSHHSGSPSAHCSKSSGSLDSSKVYIVSHSSGQQVPGSMSKPYHRQGAVNKYVIGWKKSEGSPPPEEPEVTECPGMYSEMDVMSTATQHQTVVGDAVAETQHVLSKEDFLKLMLPDSPLVEEGRRKFSFYGNLSPRRSLYRTLSDESICSNRRGSSFGSSRSSVLDQALPNDILFSTTPPYHSTLPPRAHPAPSMGSLRNEFWFSDGSLSDKSKCADPGLMPLPDTATGLDWTHLVDAARAFEDQRVASFCTLTDMQHGQDLEGAQELPLCVDPGSGKEFMDTTGERSPSPLTGKVNQLELILRQLQTDLRKEKQDKAVLQAEVQHLRQDNMRLQEESQTATAQLRKFTEWFFTTIDKKS

SEQ ID NO: 35696 - protein, 1722 aa, Homo sapiens; identical to SEQ ID NO: 35694
  REGION 1..1722: note = ENSP00000262861

SEQ ID NO: 35697 - protein, 1781 aa, Homo sapiens
  REGION 1..1781: note = ENSP00000222345
MTTYRAIPSDGVDLAASCGARVGDVLPGPHTGDYAPLGFWAQNGSMSQPLGESPATATATATATTRPSPTTPAMPKMGVRARVADWPPKREALREHSNPSPSQDTDGTKATKMAHSMRSIQNGQPPTSTPASSGSKAFHRLSRRRSKDVEFQDGWPRSPGRAFLPLRHRSSSEITLSECDAEDAGEPRGARHTGALPLFREYGSTSSIDVQGMPEQSFFDILNEFRSEQPDARGCQALTELLRADPGPHLMGGGGGAKGDSHNGQPAKDSLLPLQPTKEKEKARKKPARGLGGGDTVDSSIFRKLRSSKPEGEAGRSPGEADEGRSPPEASRPWVCQKSFAHFDVQSMLFDLNEAAANRVSVSQRRNTTTGASAASAASAMASLTASRAHSLGGLDPAFTSTEDLNCKENLEQDLGDDNSNDLLLSCPHFRNEIGGECERNVSFSRASVGSPSSGEGHLAEPALSAYRTNASISVLEVPKEQQRTQSRPRQYSIEHVDLGARYYQDYFVGKEHANYFGVDEKLGPVAVSIKREKLEDHKEHGPQYQYRIIFRTRELITLRGSILEDATPTATKHGTGRGLPLKDALEYVIPELNIHCLRLALNTPKVTEQLLKLDEQGLCRKHKVGILYCKAGQSSEEEMYNNEEAGPAFEEFLSLIGEKVCLKGFTKYAAQLDVKTDSTGTHSLYTMYQDYEIMFHVSTLLPYTPNNRQQLLRKRHIGNDIVTIIFQEPGALPFTPKNIRSHFQHVFIIVRVHNPCTDNVCYSMAVTRSKDAPPFGPPIPSGTTFRKSDVFRDFLLAKVINAENAAHKSDKFHTMATRTRQEYLKDLAENCVSNTPIDSTGKFNLISLTSKKKEKTKARAGAEQHSAGAIAWRVVAQDYAQGVEIDCILGISNEFVVLLDLRTKEVVFNCYCGDVIGWTPDSSTLKIFYGRGDHIFLQATEGSVEDIREIVQRLKVMTSGWETVDMTLRRNGLGQLGFHVKYDGTVAEVEDYGFAWQAGLRQGSRLVEICKVAVVTLTHDQMIDLLRTSVTVKVVIIPPFEDGTPRRGWPETYDMNTSEPKTEQESITPGGRPPYRSNAPWQWSGPASHNSLPASKWATPTTPGHAQSLSRPLKQTPIVPFRESQPLHSKRPVSFPETPYTVSPAGADRVPPYRQPSGSFSTPGSATYVRYKPSPERYTAAPHPLLSLDPHFSHDGTSSGDSSSGGLTSQESTMERQKPEPLWHVPAQARLSAIAGSSGNKHPSRQDAAGKDSPNRHSKGEPQYSSHSSSNTLSSNASSSHSDDRWFDPLDPLEPEQDPLSKGGSSDSGIDTTLYTSSPSCMSLAKAPRPAKPHKPPGSMGLCGGGREAAGRSHHADRRREVSPAPAVAGQSKGYRPKLYSSGSSTPTGLAGGSRDPPRQPSDMGSRVGYPAQVYKTASAETPRPSQLAQPSPFQLSASVPKSFFSKQPVRNKHPTGWKRTEEPPPRPLPFSDPKKQVDTNTKNVFGQPRLRASLRDLRSPRKNYKSTIEDDLKKLIIMDNLGPEQERDTGQSPQKGLQRTLSDESLCSGRREPSFASPAGLEPGLPSDVLFTSTCAFPSSTLPARRQHQHPHPPVGPGATPAAGSGFPEKKSTISASELSLADGRDRPLRRLDPGLMPLPDTAAGLEWSSLVNAAKAYEVQRAVSLFSLNDPALSPDIPPAHSPVHSHLSLERGPPTPRTTPTMSEEPPLDLTGKVYQLEVMLKQLHTDLQKEKQDKVVLQSEVASLRQNNQRLQEESQAASEQLRKFAEIFCREKKEL

SEQ ID NO: 35698 - protein, 165 aa, Homo sapiens
  REGION 1..165: note = ENSP00000468981
  VARIANT 1: note = Any amino acid
XILEDATPTATKHGTGRGLPLKDALEYVIPELNIHCLRLALNTPKVTEQLLKLDEQGLCRKHKVGILYCKAGQSSEEEMYNNEEAGPAFEEFLSLIGEKVCLKGFTKYAAQLDVKIETGFHHVGQAGLELLTSDDPPASASQSAGIIGVNHQAWPVYLIFKSRLK

SEQ ID NO: 35699 - protein, 184 aa, Homo sapiens
  REGION 1..184: note = ENSP00000472734
MPFWGHSPESDMGSRVGYPAQVYKTASAETPRPSQLAQPSPFQLSASVPKSFFSKQPVRNKHPTGWKRTEEPPPRPLPFSDPKKQVDTNTKNVFGQPRLRASLRDLRSPRKNYKSTIEDDLKKLIIMDNLGPEQERDTGSPQKGLQRTLSDESLCSGRREPSFASPAGLEPGLPSDVLFTSTCA

SEQ ID NO: 35700 - protein, 508 aa, Homo sapiens
  REGION 1..508: note = ENSP00000478763
MEPAGPAPGRLGPLLCLLLAASCAWSGVAGEEELQVIQPDKSVLVAAGETATLRCTATSLIPVGPIQWFRGAGPGRELIYNQKEGHFPRVTTVSDLTKRNNMDFSIRIGNITPADAGTYYCVKFRKGSPDDVEFKSGAGTELSVRAKPSAPVVSGPAARATPQHTVSFTCESHGFSPRDITLKWFKNGNELSDFQTNVDPVGESVSYSIHSTAKVVLTREDVHSQVICEVAHVTLQGDPLRGTANLSETIRVPPTLEVTQQPVRAENQVNVTCQVRKFYPQRLQLTWLENGNVSRTETASTVTENKDGTYNWMSWLLVNVSAHRDDVKLTCQVEHDGQPAVSKSHDLKVSAHPKEQGSNTAAENTGSNERNIYIVVGVVCTLLVALLMAALYLVRIRQKKAQGSTSSTRLHEPEKNAREITQVQSLDTNDITYADLNLPKGKKPAPQAAEPNNHTEYASIQTSPQPASEDTLTYADLDMVHLNRTPKQPAPKPEPSFSEYASVQVPRK

SEQ ID NO: 35701 - protein, 504 aa, Homo sapiens
  REGION 1..504: note = ENSP00000348307
MEPAGPAPGRLGPLLCLLLAASCAWSGVAGEEELQVIQPDKSVLVAAGETATLRCTATSLIPVGPIQWFRGAGPGRELIYNQKEGHFPRVTTVSDLTKRNNMDFSIRIGNITPADAGTYYCVKFRKGSPDDVEFKSGAGTELSVRAKPSAPVVSGPAARATPQHTVSFTCESHGFSPRDITLKWFKNGNELSDFQTNVDPVGESVSYSIHSTAKVVLTREDVHSQVICEVAHVTLQGDPLRGTANLSETIRVPPTLEVTQQPVRAENQVNVTCQVRKFYPQRLQLTWLENGNVSRTETASTVTENKDGTYNWMSWLLVNVSAHRDDVKLTCQVEHDGQPAVSKSHDLKVSAHPKEQGSNTAAENTGSNERNIYIVVGVVCTLLVALLMAALYLVRIRQKKAQGSTSSTRLHEPEKNAREITQDTNDITYADLNLPKGKKPAPQAAEPNNHTEYASIQTSPQPASEDTLTYADLDMVHLNRTPKQPAPKPEPSFSEYASVQVPRK

SEQ ID NO: 35702 - protein, 504 aa, Homo sapiens; identical to SEQ ID NO: 35701
  REGION 1..504: note = ENSP00000351621

SEQ ID NO: 35703 - protein, 504 aa, Homo sapiens; identical to SEQ ID NO: 35701
  REGION 1..504: note = ENSP00000382941

SEQ ID NO: 35704 - protein, 781 aa, Homo sapiens
  REGION 1..781: note = ENSP00000216513
MSSSSPTGQIASAADIKQENGMESASEGQEAHREVAGGAAVGLSPPAPAPFPLEPGDAATAAARVSGEEGAVAAAAAGAAADQVQLHSELLGRHHHAAAAAAQTPLAFSPDHVACVCEALQQGGNLDRLARFLWSLPQSDLLRGNESLLKARALVAFHQGIYPELYSILESHSFESANHPLLQQLWYKARYTEAERARGRPLGAVDKYRLRRKFPLPRTIWDGEETVYCFKEKSRNALKELYKQNRYPSPAEKRHLAKITGLSLTQVSNWFKNRRQRDRNPSETQSKSESDGNPSTEDESSKGHEDLSPHPLSSSSDGITNLSLSSHMEPVYMQQIGNAKISLSSSGVLLNGSLVPASTSPVFLNGNSFIQGPSGVILNGLNVGNTQAVALNPPKMSSNIVSNGISMTDILGSTSQDVKEFKVLQSSANSATTTSYSPSVPVSFPGLIPSTEVKREGIQTVASQDGGSVVTFTTPVQINQYGIVQIPNSGANSQFLNGSIGFSPLQLPPVSVAASQGNISVSSSTSDGSTFTSESTTVQQGKVFLSSLAPSAVVYTVPNTGQTIGSVKQEGLERSLVFSQLMPVNQNAQVNANLSSENISGSGLHPLASSLVNVSPTHNFSLSPSTLLNPTELNRDIADSQPMSAPVASKSTVTSVSNTNYATLQNCSLITGQDLLSVPMTQAALGEIVPTAEDQVGHPSPAVHQDFVQEHRLVLQSVANMKENFLSNSESKATSSLMMLDSKSKYVLDGMVDTVCEDLETDKKELAKLQTVQLDEDMQDL

SEQ ID NO: 35705 - protein, 494 aa, Homo sapiens
  REGION 1..494: note = ENSP00000450761
MIASAADIKQENGMESASEGQEAHREVAGGAAVGLSPPAPAPFPLEPGDAATAAARVSGEEGAVAAAAAGAAADQVQLHSELLGRHHHAAAAAAQTPLAFSPDHVACVCEALQQGGNLDRLARFLWSLPQSDLLRGNESLLKARALVAFHQGIYPELYSILESHSFESANHPLLQQLWYKARYTEAERARGRPLGAVDKYRLRRKFPLPRTIWDGEETVYCFKEKSRNALKELYKQNRYPSPAEKRHLAKITGLSLTQVSNWFKNRRQRDRNPSETQSKSESDGNPSTEDESSKGHEDLSPHPLSSSSDGITNLSLSSHMEPVYMQQIGNAKISLSSSGVLLNGSLVPASTSPVFLNGNSFIQGPSGVILNGLNVGNTQAVALNPPKMSSNIVSNGISMTDILGSTSQDVKEFKVLQSSANSATTTSYSPSVPVSFPGLIPSTEVKREGIQTVASQDGGSVVTFTTPVQINQYGIVQIPNSGANSQFLNGSIGF

SEQ ID NO: 35706 - protein, 359 aa, Homo sapiens
  REGION 1..359: note = ENSP00000005587
MPNPSSTSSPYPLPEEIRNLLADVETFVADILKGENLSKKAKEKRESLIKKIKDVKSIYLQEFQDKGDAEDGEEYDDPFAGPPDTISLASERYDKDDEAPSDGAQFPPIAAQDLPFVLKAGYLEKRRKDHSFLGFEWQKRWCALSKTVFYYYGSDKDKQQKGEFAIDGYSVRMNNTLRKDGKKDCCFEISAPDKRIYQFTAASPKDAEEWVQQLKFVLQDMESDIIPEDYDERGELYDDVDHPLPISNPLTSSQPIDDEIYEELPEEEEDSAPVKVEEQRKMSQDSVHHTSGDKSTDYANFYQGLWDCTGAFSDELSFKRGDVIYILSKEYNRYGWWVGEMKGAIGLVPKAYIMEMYDI

SEQ ID NO: 35707 - protein, 126 aa, Homo sapiens
  REGION 1..126: note = ENSP00000408163
MTTRSVLDVETFVADILKGENLSKKAKEKRESLIKKIKDVKSIYLQEFQDKGDAEDGEEYDDPFAGPPDTISLASERYDKDDEAPSDGAQFPPIAAQDLPFVLKAGYLEKRRKDHSFLGFEWQKRW

SEQ ID NO: 35708 - protein, 868 aa, Homo sapiens
  REGION 1..868: note = ENSP00000343200
MIPKSLVQAAETQRGLCEPGGKGREGRSGGKGETRPRGVGTQEGKGTIPGSPREKRGERGEGDPALLPAEDLWRLPGSKDRLRSSLLPPPGPPSSDSGPGPPSSHSGKTAQGPRTLNWARKQSARTSSNLCAWSLAMATKMAEIPSSPYEPGQRGMKDTQRGDAPQRGSPEPRILQLARVGNVYLKEESSRSGRLEAKKWIPTKFLENLSVPHVDLGGNQLWSGGMEALTTQLGPGREGSSSPNSKQELQPYSGSSALKPNQVGETSLYGVPIVSLVIDGQERLCLAQISNTLLKNYSYNEIHNRRVALGITCVQCTPVQLEILRRAGAMPISSRRCGMITKREAERLCKSFLGEHKPPKLPENFAFDVVHECAWGSRGSFIPARYNSSRAKCIKCGYCSMYFSPNKFIFHSHRTPDAKYTQPDAANFNSWRRHLKLSDKSATDELSHAWEDRGLGLATGASGPAGPGGPGGGAGVRSYPVIPVPSKGFGLLQKLPPPLFPHPYGFPTAFGLCPKKDDPVLGAGEPKGGSYVSAFRPVVKDTESIAKLYGSAREAYGAGPARGPGPGAGSGGYVSPDFLSEGSSSYNSASPDVDTADEPEVDVESNRFPDDEDAQEETEPSAPSAGGGPDAGRPAFGDLAAEDLVRRPERSPPSGGGGYELREPCGPLGGPAPAKVFAPERDEHVKSAAVALGPAASYVCTPEAHEPDKEDNHSPADDLETRKSYPDQRSISQPSPANTDRGEDGLTLDVTGTHLVEKDIENLAREELQKLLLEQMELRKKLEREFQSLKDNFQDQMKRELAYREEMVQQLQIVRDTLCNELDQERKARYAIQQKLKEAHDALHHFSCKMLTPRHCTGNCSFKPPLLP

SEQ ID NO: 35709 - protein, 926 aa, Homo sapiens
  REGION 1..926: note = ENSP00000451193
MEALTTQLGPGREGSSSPNSKQELQPYSGSSALKPNQVGETSLYGVPIVSLVIDGQERLCLAQISNTLLKNYSYNEIHNRRVALGITCVQCTPVQLEILRRAGAMPISSRRCGMITKREAERLCKSFLGEHKPPKLPENFAFDVVHECAWGSRGSFIPARYNSSRAKCIKCGYCSMYFSPNKFIFHSHRTPDAKYTQPDAANFNSWRRHLKLSDKSATDELSHAWEDVKAMFNGGTRKRTFSLQGGGGGGANGGSGGQGKGGAGGGGGGGPGCGAEMAPGPPPHKSLRCGEDEAAGPPGPPPPHPQRGLGLATGASGPAGPGGPGGGAGVRSYPVIPVPSKGFGLLQKLPPPLFPHPYGFPTAFGLCPKKDDPVLGAGEPKGGPGTGSGGGGAGTGGGAGGPGASHLPPGAGAGPGGGAMFWGHQPSGAAKDAAAVAAAAAAATVYPTFPMFWPAAGSLPVPSYPAAQSQAKAVAAAVAAAAAAAAAAAGSGAPEPLDGAEPAKESGLGAEERCPSALSRGPLDEDGTDEALPPPLAPLPPPPPPPARKGSYVSAFRPVVKDTESIAKLYGSAREAYGAGPARGPGPGAGSGGYVSPDFLSEGSSSYNSASPDVDTADEPEVDVESNRFPDDEDAQEETEPSAPSAGGGPDGEQPTGPPSATSSGADGPANSPDGGSPRPRRRLGPPPAGRPAFGDLAAEDLVRRPERSPPSGGGGYELREPCGPLGGPAPAKVFAPERDEHVKSAAVALGPAASYVCTPEAHEPDKEDNHSPADDLETRKSYPDQRSISQPSPANTDRGEDGLTLDVTGTHLVEKDIENLAREELQKLLLEQMELRKKLEREFQSLKDNFQDQMKRELAYREEMVQQLQIVRDTLCNELDQERKARYAIQQKLKEAHDALHHFSCKMLTPRHCTGNCSFKPPLLP

SEQ ID NO: 35710 - protein, 937 aa, Homo sapiens
  REGION 1..937: note = ENSP00000452361
MALLCGLGSGGMEALTTQLGPGREGSSSPNSKQELQPYSGSSALKPNQVGETSLYGVPIVSLVIDGQERLCLAQISNTLLKNYSYNEIHNRRVALGITCVQCTPVQLEILRRAGAMPISSRRCGMITKREAERLCKSFLGEHKPPKLPENFAFDVVHECAWGSRGSFIPARYNSSRAKCIKCGYCSMYFSPNKFIFHSHRTPDAKYTQPDAANFNSWRRHLKLSDKSATDELSHAWEDVKAMFNGGTRKRTFSLQGGGGGGANGGSGGQGKGGAGGGGGGGPGCGAEMAPGPPPHKSLRCGEDEAAGPPGPPPPHPQRGLGLATGASGPAGPGGPGGGAGVRSYPVIPVPSKGFGLLQKLPPPLFPHPYGFPTAFGLCPKKDDPVLGAGEPKGGPGTGSGGGGAGTGGGAGGPGASHLPPGAGAGPGGGAMFWGHQPSGAAKDAAAVAAAAAAATVYPTFPMFWPAAGSLPVPSYPAAQSQAKAVAAAVAAAAAAAAAAAGSGAPEPLDGAEPAKESGLGAEERCPSALSRGPLDEDGTDEALPPPLAPLPPPPPPPARKGSYVSAFRPVVKDTESIAKLYGSAREAYGAGPARGPGPGAGSGGYVSPDFLSEGSSSYNSASPDVDTADEPEVDVESNRFPDDEDAQEETEPSAPSAGGGPDGEQPTGPPSATSSGADGPANSPDGGSPRPRRRLGPPPAGRPAFGDLAAEDLVRRPERSPPSGGGGYELREPCGPLGGPAPAKVFAPERDEHVKSAAVALGPAASYVCTPEAHEPDKEDNHSPADDLETRKSYPDQRSISQPSPANTDRGEDGLTLDVTGTHLVEKDIENLAREELQKLLLEQMELRKKLEREFQSLKDNFQDQMKRELAYREEMVQQLQIVRDTLCNELDQERKARYAIQQKLKEAHDALHHFSCKMLTPRHCTGNCSFKPPLLP

SEQ ID NO: 35711 - protein, 965 aa, Homo sapiens
  REGION 1..965: note = ENSP00000369374
MALLCGLGQVTLRIWVSLPSQSENGIGFLAARAFLRSGGMEALTTQLGPGREGSSSPNSKQELQPYSGSSALKPNQVGETSLYGVPIVSLVIDGQERLCLAQISNTLLKNYSYNEIHNRRVALGITCVQCTPVQLEILRRAGAMPISSRRCGMITKREAERLCKSFLGEHKPPKLPENFAFDVVHECAWGSRGSFIPARYNSSRAKCIKCGYCSMYFSPNKFIFHSHRTPDAKYTQPDAANFNSWRRHLKLSDKSATDELSHAWEDVKAMFNGGTRKRTFSLQGGGGGGANGGSGGQGKGGAGGGGGGGPGCGAEMAPGPPPHKSLRCGEDEAAGPPGPPPPHPQRGLGLATGASGPAGPGGPGGGAGVRSYPVIPVPSKGFGLLQKLPPPLFPHPYGFPTAFGLCPKKDDPVLGAGEPKGGPGTGSGGGGAGTGGGAGGPGASHLPPGAGAGPGGGAMFWGHQPSGAAKDAAAVAAAAAAATVYPTFPMFWPAAGSLPVPSYPAAQSQAKAVAAAVAAAAAAAAAAAGSGAPEPLDGAEPAKESGLGAEERCPSALSRGPLDEDGTDEALPPPLAPLPPPPPPPARKGSYVSAFRPVVKDTESIAKLYGSAREAYGAGPARGPGPGAGSGGYVSPDFLSEGSSSYNSASPDVDTADEPEVDVESNRFPDDEDAQEETEPSAPSAGGGPDGEQPTGPPSATSSGADGPANSPDGGSPRPRRRLGPPPAGRPAFGDLAAEDLVRRPERSPPSGGGGYELREPCGPLGGPAPAKVFAPERDEHVKSAAVALGPAASYVCTPEAHEPDKEDNHSPADDLETRKSYPDQRSISQPSPANTDRGEDGLTLDVTGTHLVEKDIENLAREELQKLLLEQMELRKKLEREFQSLKDNFQDQMKRELAYREEMVQQLQIVRDTLCNELDQERKARYAIQQKLKEAHDALHHFSCKMLTPRHCTGNCSFKPPLLP

SEQ ID NO: 35712 - protein, 1015 aa, Homo sapiens
  REGION 1..1015: note = ENSP00000414750
MASSPLPGPNDILLASPSSAFQPDTLSQPRPGHANLKPNQVGQVILYGIPIVSLVIDGQERLCLAQISNTLLKNFSYNEIHNRRVALGITCVQCTPVQLEILRRAGAMPISSRRCGMITKREAERLCKSFLGENRPPKLPDNFAFDVSHECAWGCRGSFIPARYNSSRAKCIKCSYCNMYFSPNKFIFHSHRTPDAKYTQPDAANFNSWRRHLKLTDKSPQDELVFAWEDVKAMFNGGSRKRALPQPGAHPACHPLSSVKAAAVAAAAAVAGGGGLLGPHLLGAPPPPPPPPPPLAELAGAPHAHHKRPRFDDDDDSLQEAAVVAAASLSAAAASLSVAAASGGAGTGGGGAGGGCVAGVGVGAGAGAGAGAGAKGPRSYPVIPVPSKGSFGGVLQKFPGCGGLFPHPYTFPAAAAAFSLCHKKEDAGAAAEALGGAGAGGAGAAPKAGLSGLFWPAGRKDAFYPPFCMFWPPRTPGGLPVPTYLQPPPQPPSALGCALGESPALLRQAFLDLAEPGGAAGSAEAAPPPGQPPQVVANGPGSGPPPPAGGAGSRDALFESPPGGSGGDCSAGSTPPADSVAAAGAGAAAAGSGPAGSRVPAPHHPHLLEGRKAGGGSYHHSSAFRPVGGKDDAESLAKLHGASAGAPHSAQTHPHHHHHPHHHHHHHHPPQPPSPLLLLPPQPDEPGSERHHPAPPPPPPPPPPPPLAQHPHHRGLLSPGGTSCCYPSEDSSEDEDDEEEEQEVDVEGHKPPEGEEEEEGRDPDDDEEEDEETEVLLGDPLVGGGRFLQGRGPSEKGSSRDRAPAVAGAFPLGLNSSRLLQEDGKLGDPGSDLPPPPPPPLAPQKASGGGSSSPGSPVHHPSLEEQPSYKDSQKTKENNQVIVSTKDDNSFSDKNKEHSFFITDSDASGGDFWRERSGEHTQETNSPHSLKKDVENMGKEELQKVLFEQIDLRRRLEQEFQVLKGNTSFPVFNNFQDQMKRELAYREEMVQQLQIIPYAASLIRKEKLGAHLSKS

SEQ ID NO: 35713 - protein, 296 aa, Homo sapiens
  REGION 1..296: note = ENSP00000383255
MASSPLPGPNDILLASPSSAFQPDTLSQPRPGHANLKPNQVGQVILYGIPIVSLVIDGQERLCLAQISNTLLKNFSYNEIHNRRVALGITCVQCTPVQLEILRRAGAMPISSRRCGMITKREAERLCKSFLGENRPPKLPDNFAFDVSHECAWGCRGSFIPARYNSSRAKCIKCSYCNMYFSPNKFIFHSHRTPDAKYTQPDAANFNSWRRHLKLTDKSPQDELVFAWEDVKAMFNGGSRKRALPQPGAHPACHPLSSIRTRSIAFSSQTLMLLEEIFGEKDQEDYMRINEDNIWL

SEQ ID NO: 35714 - protein, 1015 aa, Homo sapiens; identical to SEQ ID NO: 35712
  REGION 1..1015: note = ENSP00000483333

SEQ ID NO: 35715 - protein, 1212 aa, Homo sapiens
  REGION 1..1212: note = ENSP00000262461
MEPRPTAPSSGAPGLAGVGETPSAAALAAARVELPGTAVPSVPEDAAPASRDGGGVRDEGPAAAGDGLGRPLGPTPSQSRFQVDLVSENAGRAAAAAAAAAAAAAAAGAGAGAKQTPADGEASGESEPAKGSEEAKGRFRVNFVDPAASSSAEDSLSDAAGVGVDGPNVSFQNGGDTVLSEGSSLHSGGGGGSGHHQHYYYDTHTNTYYLRTFGHNTMDAVPRIDHYRHTAAQLGEKLLRPSLAELHDELEKEPFEDGFANGEESTPTRDAVVTYTAESKGVVKFGWIKGVLVRCMLNIWGVMLFIRLSWIVGQAGIGLSVLVIMMATVVTTITGLSTSAIATNGFVRGGGAYYLISRSLGPEFGGAIGLIFAFANAVAVAMYVVGFAETVVELLKEHSILMIDEINDIRIIGAITVVILLGISVAGMEWEAKAQIVLLVILLLAIGDFVIGTFIPLESKKPKGFFGYKSEIFNENFGPDFREEETFFSVFAIFFPAATGILAGANISGDLADPQSAIPKGTLLAILITTLVYVGIAVSVGSCVVRDATGNVNDTIVTELTNCTSAACKLNFDFSSCESSPCSYGLMNNFQVMSMVSGFTPLISAGIFSATLSSALASLVSAPKIFQALCKDNIYPAFQMFAKGYGKNNEPLRGYILTFLIALGFILIAELNVIAPIISNFFLASYALINFSVFHASLAKSPGWRPAFKYYNMWISLLGAILCCIVMFVINWWAALLTYVIVLGLYIYVTYKKPDVNWGSSTQALTYLNALQHSIRLSGVEDHVKNFRPQCLVMTGAPNSRPALLHLVHDFTKNVGLMICGHVHMGPRRQAMKEMSIDQAKYQRWLIKNKMKAFYAPVHADDLREGAQYLMQAAGLGRMKPNTLVLGFKKDWLQADMRDVDMYINLFHDAFDIQYGVVVIRLKEGLDISHLQGQEELLSSQEKSPGTKDVVVSVEYSKKSDLDTSKPLSEKPITHKVEEEDGKTATQPLLKKESKGPIVPLNVADQKLLEASTQFQKKQGKNTIDVWWLFDDGGLTLLIPYLLTTKKKWKDCKIRVFIGGKINRIDHDRRAMATLLSKFRIDFSDIMVLGDINTKPKKENIIAFEEIIEPYRLHEDDKEQDIADKMKEDEPWRITDNELELYKTKTYRQIRLNELLKEHSSTANIIVMSLPVARKGAVSSALYMAWLEALSKDLPPILLVRGNHQSVLTFYS

SEQ ID NO: 35716 - protein, 1150 aa, Homo sapiens
  REGION 1..1150: note = ENSP00000427109
MEPRPTAPSSGAPGLAGVGETPSAAALAAARVELPGTAVPSVPEDAAPASRDGGGVRDEGPAAAGDGLGRPLGPTPSQSRFQVDLVSENAGRAAAAAAAAAAAAAAAGAGAGAKQTPADGEASGESEPAKGSEEAKGRFRVNFVDPAASSSAEDSLSDAAGVGVDGPNVSFQNGGDTVLSEGSSLHSGGGGGSGHHQHYYYDTHTNTYYLRTFGHNTMDAVPRIDHYRHTAAQLGEKLLRPSLAELHDELEKEPFEDGFANGEESTPTRDAVVTYTAESKGVVKFGWIKGVLVRCMLNIWGVMLFIRLSWIVGQAGIGLSVLVIMMATVVTTITGLSTSAIATNGFVRGGGAYYLISRSLGPEFGGAIGLIFAFANAVAVAMYVVGFAETVVELLKEHSILMIDEINDIRIIGAITVVILLGISVAGMEWEAKAQIVLLVILLLAIGDFVIGTFIPLESKKPKGFFGYKSEIFNENFGPDFREEETFFSVFAIFFPAATGILAGANISGDLADPQSAIPKGTLLAILITTLVYVGIAVSVGSCVVRDATGNVNDTIVTELTNCTSAACKLNFDFSSCESSPCSYGLMNNFQVMSMVSGFTPLISAGIFSATLSSALASLVSAPKIFQALCKDNIYPAFQMFAKGYGKNNEPLRGYILTFLIALGFILIAELNVIAPIISNFFLASYALINFSVFHASLAKSPGWRPAFKYYNMWISLLGAILCCIVMFVINWWAALLTYVIVLGLYIYVTYKKPDVNWGSSTQALTYLNALQHSIRLSGVEDHVKNFRPQCLVMTGAPNSRPALLHLVHDFTKNVGLMICGHVHMGPRRQAMKEMSIDQAKYQRWLIKNKMKAFYAPVHADDLREGAQYLMQAAGLGRMKPNTLVLGFKKDWLQADMRDVDMYINLFHDAFDIQYGVVVIRLKEGLDISHLQGQEELLSSQEKSPGTKDVVVSVEYSKKSDLDTSKPLSEKPITHKVEEEDGKTATQPLLKKESKGPIVPLNVADQKLLEASTQFQKKQGKNTIDVWWLFDDGGLTLLIPYLLTTKKKWKDCKIRVFIGGKINRIDHDRRAMATLLSKFRIDFSDIMVLGDINTKPKKENIIAFEEIIEPYRLHEDDKEQDIADKMKEDEPWRITDNELELYKTKFYEPC

SEQ ID NO: 35717 - protein, 1196 aa, Homo sapiens
  REGION 1..1196: note = ENSP00000340878
MEPRPTAPSSGAPGLAGVGETPSAAALAAARVELPGTAVPSVPEDAAPASRDGGGVRDEGPAAAGDGLGRPLGPTPSQSRFQVDLVSENAGRAAAAAAAAAAAAAAAGAGAGAKQTPADGEASGESEPAKGSEEAKGRFRVNFVDPAASSSAEDSLSDAAGVGVDGPNVSFQNGGDTVLSEGSSLHSGGGGGSGHHQHYYYDTHTNTYYLRTFGHNTMDAVPRIDHYRHTAAQLGEKLLRPSLAELHDELEKEPFEDGFANGEESTPTRDAVVTYTAESKGVVKFGWIKGVLVRCMLNIWGVMLFIRLSWIVGQAGIGLSVLVIMMATVVTTITGLSTSAIATNGFVRGGGAYYLISRSLGPEFGGAIGLIFAFANAVAVAMYVVGFAETVVELLKEHSILMIDEINDIRIIGAITVVILLGISVAGMEWEAKAQIVLLVILLLAIGDFVIGTFIPLESKKPKGFFGYKSEIFNENFGPDFREEETFFSVFAIFFPAATGILAGANISGDLADPQSAIPKGTLLAILITTLVYVGIAVSVGSCVVRDATGNVNDTIVTELTNCTSAACKLNFDFSSCESSPCSYGLMNNFQVMSMVSGFTPLISAGIFSATLSSALASLVSAPKIFQALCKDNIYPAFQMFAKGYGKNNEPLRGYILTFLIALGFILIAELNVIAPIISNFFLASYALINFSVFHASLAKSPGWRPAFKYYNMWISLLGAILCCIVMFVINWWAALLTYVIVLGLYIYVTYKKPDVNWGSSTQALTYLNALQHSIRLSGVEDHVKNFRPQCLVMTGAPNSRPALLHLVHDFTKNVGLMICGHVHMGPRRQAMKEMSIDQAKYQRWLIKNKMKAFYAPVHADDLREGAQYLMQAAGLGRMKPNTLVLGFKKDWLQADMRDVDMYINLFHDAFDIQYGVVVIRLKEGLDISHLQGQEELLSSQEKSPGTKDVVVSVEYSKKSDLDTSKPLSEKPITHKESKGPIVPLNVADQKLLEASTQFQKKQGKNTIDVWWLFDDGGLTLLIPYLLTTKKKWKDCKIRVFIGGKINRIDHDRRAMATLLSKFRIDFSDIMVLGDINTKPKKENIIAFEEIIEPYRLHEDDKEQDIADKMKEDEPWRITDNELELYKTKTYRQIRLNELLKEHSSTANIIVMSLPVARKGAVSSALYMAWLEALSKDLPPILLVRGNHQSVLTFYS

SEQ ID NO: 35718 - protein, 1150 aa, Homo sapiens; identical to SEQ ID NO: 35716
  REGION 1..1150: note = ENSP00000486323

SEQ ID NO: 35719 - protein, 1029 aa, Homo sapiens
  REGION 1..1029: note = ENSP00000457552
MAELPTTETPGDATLCSGRFTISTLLSSDEPSPPAAYDSSHPSHLTHSSTFCMRTFGYNTIDVVPTYEHYANSTQPGEPRKVRPTLADLHSFLKEGRHLHALAFDSRPSHEMTDGLVEGEAGTSSEKNPEEPVRFGWVKGVMIRCMLNIWGVILYLRLPWITAQAGIVLTWIIILLSVTVTSITGLSISAISTNGKVKSGGTYFLISRSLGPELGGSIGLIFAFANAVGVAMHTVGFAETVRDLLQEYGAPIVDPINDIRIIAVVSVTVLLAISLAGMEWESKAQVLFFLVIMVSFANYLVGTLIPPSEDKASKGFFSYRADIFVQNLVPDWRGPDGTFFGMFSIFFPSATGILAGANISGDLKDPAIAIPKGTLMAIFWTTISYLAISATIGSCVVRDASGVLNDTVTPGWGACEGLACSYGWNFTECTQQHSCHYGLINYYQTMSMVSGFAPLITAGIFGATLSSALACLVSAAKVFQCLCEDQLYPLIGFFGKGYGKNKEPVRGYLLAYAIAVAFIIIAELNTIAPIISNFFLCSYALINFSCFHASITNSPGWRPSFQYYNKWAALFGAIISVVIMFLLTWWAALIAIGVVLFLLLYVIYKKPEVNWGSSVQAGSYNLALSYSVGLNEVEDHIKNYRPQCLVLTGPPNFRPALVDFVGTFTRNLSLMICGHVLIGPHKQRMPELQLIANGHTKWLNKRKIKAFYSDVIAEDLRRGVQILMQAAGLGRMKPNILVVGFKKNWQSAHPATVEDYIGILHDAFDFNYGVCVMRMREGLNVSKMMQAHINPVFDPAEDGKEASARGARPSVSGALDPKALVKEEQATTIFQSEQGKKTIDIYWLFDDGGLTLLIPYLLGRKRRWSKCKIRVFVGGQINRMDQERKAIISLLSKFRLGFHEVHILPDINQNPRAEHTKRFEDMIAPFRLNDGFKDEATVNEMRRDCPWKISDEEITKNRVKSLRQVRLNEIVLDYSRDAALIVITLPIGRKGKCPSSLYMAWLETLSQDLRPPVILIRGNQENVLTFYCQ

SEQ ID NO: 35720 - protein, 1030 aa, Homo sapiens
  REGION 1..1030: note = ENSP00000402152
MAELPTTETPGDATLCSGRFTISTLLSSDEPSPPAAYDSSHPSHLTHSSTFCMRTFGYNTIDVVPTYEHYANSTQPGEPRKVRPTLADLHSFLKQEGRHLHALAFDSRPSHEMTDGLVEGEAGTSSEKNPEEPVRFGWVKGVMIRCMLNIWGVILYLRLPWITAQAGIVLTWIIILLSVTVTSITGLSISAISTNGKVKSGGTYFLISRSLGPELGGSIGLIFAFANAVGVAMHTVGFAETVRDLLQEYGAPIVDPINDIRIIAVVSVTVLLAISLAGMEWESKAQVLFFLVIMVSFANYLVGTLIPPSEDKASKGFFSYRADIFVQNLVPDWRGPDGTFFGMFSIFFPSATGILAGANISGDLKDPAIAIPKGTLMAIFWTTISYLAISATIGSCVVRDASGVLNDTVTPGWGACEGLACSYGWNFTECTQQHSCHYGLINYYQTMSMVSGFAPLITAGIFGATLSSALACLVSAAKVFQCLCEDQLYPLIGFFGKGYGKNKEPVRGYLLAYAIAVAFIIIAELNTIAPIISNFFLCSYALINFSCFHASITNSPGWRPSFQYYNKWAALFGAIISVVIMFLLTWWAALIAIGVVLFLLLYVIYKKPEVNWGSSVQAGSYNLALSYSVGLNEVEDHIKNYRPQCLVLTGPPNFRPALVDFVGTFTRNLSLMICGHVLIGPHKQRMPELQLIANGHTKWLNKRKIKAFYSDVIAEDLRRGVQILMQAAGLGRMKPNILVVGFKKNWQSAHPATVEDYIGILHDAFDFNYGVCVMRMREGLNVSKMMQAHINPVFDPAEDGKEASARGARPSVSGALDPKALVKEEQATTIFQSEQGKKTIDIYWLFDDGGLTLLIPYLLGRKRRWSKCKIRVFVGGQINRMDQERKAIISLLSKFRLGFHEVHILPDINQNPRAEHTKRFEDMIAPFRLNDGFKDEATVNEMRRDCPWKISDEEITKNRVKSLRQVRLNEIVLDYSRDAALIVITLPIGRKGKCPSSLYMAWLETLSQDLRPPVILIRGNQENVLTFYCQ

SEQ ID NO: 35721 - protein, 1021 aa, Homo sapiens
  REGION 1..1021: note = ENSP00000456149
MAELPTTETPGDATLCSGRFTISTLLSSDEPSPPAAYDSSHPSHLTHSSTFCMRTFGYNTIDVVPTYEHYANSTQPGEPRKVRPTLADLHSFLKQEGRHLHALAFDSRPSHEMTDGLVEGEAGTSSEKNPEEPVRFGWVKGVMIRCMLNIWGVILYLRLPWITAQAGIVLTWIIILLSVTVTSITGLSISAISTNGKVKSGGTYFLISRSLGPELGGSIGLIFAFANAVGVAMHTVGFAETVRDLLQEYGAPIVDPINDIRIIAVVSVTVLLAISLAGMEWESKAQVLFFLVIMVSFANYLVGTLIPPSEDKASKGFFSYRADIFVQNLVPDWRGPDGTFFGMFSIFFPSATGILAGANISGDLKDPAIAIPKGTLMAIFWTTISYLAISATIGSCVVRDASGVLNDTVTPGWGACEGLACSYGWNFTECTQQHSCHYGLINYYQTMSMVSGFAPLITAGIFGATLSSALACLVSAAKVFQCLCEDQLYPLIGFFGKGYGKNKEPVRGYLLAYAIAVAFIIIAELNTIAPIISNFFLCSYALINFSCFHASITNSPGWRPSFQYYNKWAALFGAIISVVIMFLLTWWAALIAIGVVLFLLLYVIYKKPEVNWGSSVQAGSYNLALSYSVGLNEVEDHIKNYRPQCLVLTGPPNFRPALVDFVGTFTRNLSLMICGHVLIGPHKQRMPELQLIANGHTKWLNKRKIKAFYSDVIAEDLRRGVQILMQAAGLGRMKPNILVVGFKKNWQSAHPATVEDYIGILHDAFDFNYGVCVMRMREGLNVSKMMQAHINPVFDPAEDGKEASARVDPKALVKEEQATTIFQSEQGKKTIDIYWLFDDGGLTLLIPYLLGRKRRWSKCKIRVFVGGQINRMDQERKAIISLLSKFRLGFHEVHILPDINQNPRAEHTKRFEDMIAPFRLNDGFKDEATVNEMRRDCPWKISDEEITKNRVKSLRQVRLNEIVLDYSRDAALIVITLPIGRKGKCPSSLYMAWLETLSQDLRPPVILIRGNQENVLTFYCQ

SEQ ID NO: 35722 - protein, 1020 aa, Homo sapiens
  REGION 1..1020: note = ENSP00000262502
MAELPTTETPGDATLCSGRFTISTLLSSDEPSPPAAYDSSHPSHLTHSSTFCMRTFGYNTIDVVPTYEHYANSTQPGEPRKVRPTLADLHSFLKEGRHLHALAFDSRPSHEMTDGLVEGEAGTSSEKNPEEPVRFGWVKGVMIRCMLNIWGVILYLRLPWITAQAGIVLTWIIILLSVTVTSITGLSISAISTNGKVKSGGTYFLISRSLGPELGGSIGLIFAFANAVGVAMHTVGFAETVRDLLQEYGAPIVDPINDIRIIAVVSVTVLLAISLAGMEWESKAQVLFFLVIMVSFANYLVGTLIPPSEDKASKGFFSYRADIFVQNLVPDWRGPDGTFFGMFSIFFPSATGILAGANISGDLKDPAIAIPKGTLMAIFWTTISYLAISATIGSCVVRDASGVLNDTVTPGWGACEGLACSYGWNFTECTQQHSCHYGLINYYQTMSMVSGFAPLITAGIFGATLSSALACLVSAAKVFQCLCEDQLYPLIGFFGKGYGKNKEPVRGYLLAYAIAVAFIIIAELNTIAPIISNFFLCSYALINFSCFHASITNSPGWRPSFQYYNKWAALFGAIISVVIMFLLTWWAALIAIGVVLFLLLYVIYKKPEVNWGSSVQAGSYNLALSYSVGLNEVEDHIKNYRPQCLVLTGPPNFRPALVDFVGTFTRNLSLMICGHVLIGPHKQRMPELQLIANGHTKWLNKRKIKAFYSDVIAEDLRRGVQILMQAAGLGRMKPNILVVGFKKNWQSAHPATVEDYIGILHDAFDFNYGVCVMRMREGLNVSKMMQAHINPVFDPAEDGKEASARVDPKALVKEEQATTIFQSEQGKKTIDIYWLFDDGGLTLLIPYLLGRKRRWSKCKIRVFVGGQINRMDQERKAIISLLSKFRLGFHEVHILPDINQNPRAEHTKRFEDMIAPFRLNDGFKDEATVNEMRRDCPWKISDEEITKNRVKSLRQVRLNEIVLDYSRDAALIVITLPIGRKGKCPSSLYMAWLETLSQDLRPPVILIRGNQENVLTFYCQ

SEQ ID NO: 35723 - protein, 1085 aa, Homo sapiens
  REGION 1..1085: note = ENSP00000318557
MPHFTVVPVDGPRRGDYDNLEGLSWVDYGERAELDDSDGHGNHRESSPFLSPLEASRGIDYYDRNLALFEEELDIRPKVSSLLGKLVSYTNLTQGAKEHEEAESGEGTRRRAAEAPSMGTLMGVYLPCLQNIFGVILFLRLTWMVGTAGVLQALLIVLICCCCTLLTAISMSAIATNGVVPAGGSYFMISRSLGPEFGGAVGLCFYLGTTFAAAMYILGAIEILLTYIAPPAAIFYPSGAHDTSNATLNNMRVYGTIFLTFMTLVVFVGVKYVNKFASLFLACVIISILSIYAGGIKSIFDPPVFPVCMLGNRTLSRDQFDICAKTAVVDNETVATQLWSFFCHSPNLTTDSCDPYFMLNNVTEIPGIPGAAAGVLQENLWSAYLEKGDIVEKHGLPSADAPSLKESLPLYVVADIATSFTVLVGIFFPSVTGIMAGSNRSGDLRDAQKSIPVGTILAIITTSLVYFSSVVLFGACIEGVVLRDKYGDGVSRNLVVGTLAWPSPWVIVIGSFFSTCGAGLQSLTGAPRLLQAIAKDNIIPFLRVFGHGKVNGEPTWALLLTALIAELGILIASLDMVAPILSMFFLMCYLFVNLACAVQTLLRTPNWRPRFKYYHWALSFLGMSLCLALMFVSSWYYALVAMLIAGMIYKYIEYQGAEKEWGDGIRGLSLSAARYALLRLEEGPPHTKNWRPQLLVLLKLDEDLHVKYPRLLTFASQLKAGKGLTIVGSVIQGSFLESYGEAQAAEQTIKNMMEIEKVKGFCQVVVASKVREGLAHLIQSCGLGGMRHNSVVLGWPYGWRQSEDPRAWKTFIDTVRCTTAAHLALLVPKNIAFYPSNHERYLEGHIDVWWIVHDGGMLMLLPFLLRQHKVWRKCRMRIFTVAQMDDNSIQMKKDLAVFLYHLRLEAEVEVVEMHNSDISAYTYERTLMMEQRSQMLRQMRLTKTEREREAQLVKDRHSALRLESLYSDEEDESAVGADKIQMTWTRDKYMTETWDPSHAPDNFRELVHIKPDQSNVRRMHTAVKLNEVIVTRSHDARLVLLNMPGPPRNSEGDENYMEFLEVLTEGLERVLLVRGGGREVITIYS

SEQ ID NO: 35724 - protein, 1037 aa, Homo sapiens
  REGION 1..1037: note = ENSP00000461403
MTTSRGSVGWTTGSAPSWMTRTEELDIRPKVSSLLGKLVSYTNLTQGAKEHEEAESGEGTRRRAAEAPSMGTLMGVYLPCLQNIFGVILFLRLTWMVGTAGVLQALLIVLICCCCTLLTAISMSAIATNGVVPAGGSYFMISRSLGPEFGGAVGLCFYLGTTFAAAMYILGAIEILLTYIAPPAAIFYPSGAHDTSNATLNNMRVYGTIFLTFMTLVVFVGVKYVNKFASLFLACVIISILSIYAGGIKSIFDPPVFPVCMLGNRTLSRDQFDICAKTAVVDNETVATQLWSFFCHSPNLTTDSCDPYFMLNNVTEIPGIPGAAAGVLQENLWSAYLEKGDIVEKHGLPSADAPSLKESLPLYVVADIATSFTVLVGIFFPSVTGIMAGSNRSGDLRDAQKSIPVGTILAIITTSLVYFSSVVLFGACIEGVVLRDKYGDGVSRNLVVGTLAWPSPWVIVIGSFFSTCGAGLQSLTGAPRLLQAIAKDNIIPFLRVFGHGKVNGEPTWALLLTALIAELGILIASLDMVAPILSMFFLMCYLFVNLACAVQTLLRTPNWRPRFKYYHWALSFLGMSLCLALMFVSSWYYALVAMLIAGMIYKYIEYQGAEKEWGDGIRGLSLSAARYALLRLEEGPPHTKNWRPQLLVLLKLDEDLHVKYPRLLTFASQLKAGKGLTIVGSVIQGSFLESYGEAQAAEQTIKNMMEIEKVKGFCQVVVASKVREGLAHLIQSCGLGGMRHNSVVLGWPYGWRQSEDPRAWKTFIDTVRCTTAAHLALLVPKNIAFYPSNHERYLEGHIDVWWIVHDGGMLMLLPFLLRQHKVWRKCRMRIFTVAQMDDNSIQMKKDLAVFLYHLRLEAEVEVVEMHNSDISAYTYERTLMMEQRSQMLRQMRLTKTEREREAQLVKDRHSALRLESLYSDEEDESAVGADKIQMTWTRDKYMTETWDPSHAPDNFRELVHIKPDQSNVRRMHTAVKLNEVIVTRSHDARLVLLNMPGPPRNSEGDENYMEFLEVLTEGLERVLLVRGGGREVITIYS

SEQ ID NO: 35725 - protein, 1054 aa, Homo sapiens
  REGION 1..1054: note = ENSP00000438334
MGDTLSPGHGNHRESSPFLSPLEASRGIDYYDRNLALFEEELDIRPKVSSLLGKLVSYTNLTQGAKEHEEAESGEGTRRRAAEAPSMGTLMGVYLPCLQNIFGVILFLRLTWMVGTAGVLQALLIVLICCCCTLLTAISMSAIATNGVVPAGGSYFMISRSLGPEFGGAVGLCFYLGTTFAAAMYILGAIEILLTYIAPPAAIFYPSGAHDTSNATLNNMRVYGTIFLTFMTLVVFVGVKYVNKFASLFLACVIISILSIYAGGIKSIFDPPVFPVCMLGNRTLSRDQFDICAKTAVVDNETVATQLWSFFCHSPNLTTDSCDPYFMLNNVTEIPGIPGAAAGVLQENLWSAYLEKGDIVEKHGLPSADAPSLKESLPLYVVADIATSFTVLVGIFFPSVTGIMAGSNRSGDLRDAQKSIPVGTILAIITTSLVYFSSVVLFGACIEGVVLRDKYGDGVSRNLVVGTLAWPSPWVIVIGSFFSTCGAGLQSLTGAPRLLQAIAKDNIIPFLRVFGHGKVNGEPTWALLLTALIAELGILIASLDMVAPILSMFFLMCYLFVNLACAVQTLLRTPNWRPRFKYYHWALSFLGMSLCLALMFVSSWYYALVAMLIAGMIYKYIEYQGAEKEWGDGIRGLSLSAARYALLRLEEGPPHTKNWRPQLLVLLKLDEDLHVKYPRLLTFASQLKAGKGLTIVGSVIQGSFLESYGEAQAAEQTIKNMMEIEKVKGFCQVVVASKVREGLAHLIQSCGLGGMRHNSVVLGWPYGWRQSEDPRAWKTFIDTVRCTTAAHLALLVPKNIAFYPSNHERYLEGHIDVWWIVHDGGMLMLLPFLLRQHKVWRKCRMRIFTVAQMDDNSIQMKKDLAVFLYHLRLEAEVEVVEMHNSDISAYTYERTLMMEQRSQMLRQMRLTKTEREREAQLVKDRHSALRLESLYSDEEDESAVGADKIQMTWTRDKYMTETWDPSHAPDNFRELVHIKPDQSNVRRMHTAVKLNEVIVTRSHDARLVLLNMPGPPRNSEGDENYMEFLEVLTEGLERVLLVRGGGREVITIYS

SEQ ID NO: 35726 - protein, 1068 aa, Homo sapiens
  REGION 1..1068: note = ENSP00000458902
MPHFTVVPVDGPRRGDYDNLEGLSWVDYGERAELDDSDGHGNHRESSPFLSPLEASRGIDYYDRNLALFEEELDIRPKVSSLLGKLVSYTNLTQGAKEHEEAESGEGTRRRAAEAPSMGTLMGVYLPCLQNIFGVILFLRLTWMVGTAGVLQALLIVLICCCCTLLTAISMSAIATNGVVPAGGSYFMISRSLGPEFGGAVGLCFYLGTTFAAAMYILGAIEILLTYIAPPAAIFYPSGAHDTSNATLNNMRVYGTIFLTFMTLVVFVGVKYVNKFASLFLACVIISILSIYAGGIKSIFDPPVFPVCMLGNRTLSRDQFDICAKTAVVDNETVATQLWSFFCHSPNLTTDSCDPYFMLNNVTEIPGIPGAAAGVLQENLWSAYLEKGDIVEKHGLPSADAPSLKESLPLYVVADIATSFTVLVGIFFPSVTGIMAGSNRSGDLRDAQKSIPVGTILAIITTSLVYFSSVVLFGACIEGVVLRDKYGDGVSRNLVVGTLAWPSPWVIVIGSFFSTCGAGLQSLTGAPRLLQAIAKDNIIPFLRVFGHGKVNGEPTWALLLTALIAELGILIASLDMVAPILSMFFLMCYLFVNLACAVQTLLRTPNWRPRFKYYHWALSFLGMSLCLALMFVSSWYYALVAMLIAGMIYKYIEYQGAEKEWGDGIRGLSLSAARYALLRLEEGPPHTKNWRPQLLVLLKLDEDLHVKYPRLLTFASQLKAGKGLTIVGSVIQGSFLESYGEAQAAEQTIKNMMEIEKVKGFCQVVVASKVREGLAHLIQSCGLGGMRHNSVVLGWPYGWRQSEDPRAWKTFIDTVRCTTAAHLALLVPKNIAFYPSNHERYLEGHIDVWWIVHDGGMLMLLPFLLRQHKVWRKCRMRIFTVAQMDDNSIQMKKDLAVFLYHLRLEAEVEVVEMHNSDISAYTYERTLMMEQRSQMLRQMRLTKTEREREAQLVKDRHSALRLESLYSDEEDESAVGADKIQMTWTRDKYMTETWDPSHAPDNFRELVHIKPDQSNVRRMHTAVKLNEVIVTRSHDARLVLLNMPGPPRNSEGDENCIPLWRGRQLGGG

SEQ ID NO: 35727 - protein, 1079 aa, Homo sapiens
  REGION 1..1079: note = ENSP00000445962
MAAEGAVCGFVYLEGTAWAVPEDTEPLASCTLGHGNHRESSPFLSPLEASRGIDYYDRNLALFEEELDIRPKVSSLLGKLVSYTNLTQGAKEHEEAESGEGTRRRAAEAPSMGTLMGVYLPCLQNIFGVILFLRLTWMVGTAGVLQALLIVLICCCCTLLTAISMSAIATNGVVPAGGSYFMISRSLGPEFGGAVGLCFYLGTTFAAAMYILGAIEILLTYIAPPAAIFYPSGAHDTSNATLNNMRVYGTIFLTFMTLVVFVGVKYVNKFASLFLACVIISILSIYAGGIKSIFDPPVFPVCMLGNRTLSRDQFDICAKTAVVDNETVATQLWSFFCHSPNLTTDSCDPYFMLNNVTEIPGIPGAAAGVLQENLWSAYLEKGDIVEKHGLPSADAPSLKESLPLYVVADIATSFTVLVGIFFPSVTGIMAGSNRSGDLRDAQKSIPVGTILAIITTSLVYFSSVVLFGACIEGVVLRDKYGDGVSRNLVVGTLAWPSPWVIVIGSFFSTCGAGLQSLTGAPRLLQAIAKDNIIPFLRVFGHGKVNGEPTWALLLTALIAELGILIASLDMVAPILSMFFLMCYLFVNLACAVQTLLRTPNWRPRFKYYHWALSFLGMSLCLALMFVSSWYYALVAMLIAGMIYKYIEYQGAEKEWGDGIRGLSLSAARYALLRLEEGPPHTKNWRPQLLVLLKLDEDLHVKYPRLLTFASQLKAGKGLTIVGSVIQGSFLESYGEAQAAEQTIKNMMEIEKVKGFCQVVVASKVREGLAHLIQSCGLGGMRHNSVVLGWPYGWRQSEDPRAWKTFIDTVRCTTAAHLALLVPKNIAFYPSNHERYLEGHIDVWWIVHDGGMLMLLPFLLRQHKVWRKCRMRIFTVAQMDDNSIQMKKDLAVFLYHLRLEAEVEVVEMHNSDISAYTYERTLMMEQRSQMLRQMRLTKTEREREAQLVKDRHSALRLESLYSDEEDESAVGADKIQMTWTRDKYMTETWDPSHAPDNFRELVHIKPDQSNVRRMHTAVKLNEVIVTRSHDARLVLLNMPGPPRNSEGDENYMEFLEVLTEGLERVLLVRGGGREVITIYS

SEQ ID NO: 35728 - protein, 19 aa, Homo sapiens
  REGION 1..19: note = ENSP00000463148
  VARIANT 1: note = Any amino acid
XPDNFRELVHIKPMAHGDL

SEQ ID NO: 35729 - protein, 90 aa, Homo sapiens
  REGION 1..90: note = ENSP00000464660
  VARIANT 1: note = Any amino acid
XPQLLVLLKLDEDLHVKYPRLLTFASQLKAGKGLTIVGSVIQGSFLESYGEAQAAEQTPCAALRLPTWPCSCPRTSPSTPATTSATWRAT

SEQ ID NO: 35730 - protein, 54 aa, Homo sapiens
  REGION 1..54: note = ENSP00000458975
MPHFTVVPVDGPRRGDYDNLEGLSWVDYGERAELDDSDDLHCPTSCHFLPIGCS

SEQ ID NO: 35731 - protein, 178 aa, Homo sapiens
  REGION 1..178: note = ENSP00000464168
MGTLMGVYLPCLQNIFGVILFLRLTWMVGTAGVLQALLIVLICCCCTLLTAISMSAIATNGVVPAGGSYFMISRSLGPEFGGAVGLCFYLGTTFAAAMYILGAIEILLTYIAPPAAIFYPSGAHDTSNATLNNMRVYGTIFLTFMTLVVFVGVKYVNKFASLFLACVIISILSIYAGG

SEQ ID NO: 35732 - protein, 1087 aa, Homo sapiens
  REGION 1..1087: note = ENSP00000395983
MRAGGACRPGAAGTAAGTAAGGWDGGCGGAEPARCLTSPWCQWTGRGAATMTTSRGSVGWTTGSAPSWMTRTEELDIRPKVSSLLGKLVSYTNLTQGAKEHEEAESGEGTRRRAAEAPSMGTLMGVYLPCLQNIFGVILFLRLTWMVGTAGVLQALLIVLICCCCTLLTAISMSAIATNGVVPAGGSYFMISRSLGPEFGGAVGLCFYLGTTFAAAMYILGAIEILLTYIAPPAAIFYPSGAHDTSNATLNNMRVYGTIFLTFMTLVVFVGVKYVNKFASLFLACVIISILSIYAGGIKSIFDPPVFPVCMLGNRTLSRDQFDICAKTAVVDNETVATQLWSFFCHSPNLTTDSCDPYFMLNNVTEIPGIPGAAAGVLQENLWSAYLEKGDIVEKHGLPSADAPSLKESLPLYVVADIATSFTVLVGIFFPSVTGIMAGSNRSGDLRDAQKSIPVGTILAIITTSLVYFSSVVLFGACIEGVVLRDKYGDGVSRNLVVGTLAWPSPWVIVIGSFFSTCGAGLQSLTGAPRLLQAIAKDNIIPFLRVFGHGKVNGEPTWALLLTALIAELGILIASLDMVAPILSMFFLMCYLFVNLACAVQTLLRTPNWRPRFKYYHWALSFLGMSLCLALMFVSSWYYALVAMLIAGMIYKYIEYQGAEKEWGDGIRGLSLSAARYALLRLEEGPPHTKNWRPQLLVLLKLDEDLHVKYPRLLTFASQLKAGKGLTIVGSVIQGSFLESYGEAQAAEQTIKNMMEIEKVKGFCQVVVASKVREGLAHLIQSCGLGGMRHNSVVLGWPYGWRQSEDPRAWKTFIDTVRCTTAAHLALLVPKNIAFYPSNHERYLEGHIDVWWIVHDGGMLMLLPFLLRQHKVWRKCRMRIFTVAQMDDNSIQMKKDLAVFLYHLRLEAEVEVVEMHNSDISAYTYERTLMMEQRSQMLRQMRLTKTEREREAQLVKDRHSALRLESLYSDEEDESAVGADKIQMTWTRDKYMTETWDPSHAPDNFRELVHIKPDQSNVRRMHTAVKLNEVIVTRSHDARLVLLNMPGPPRNSEGDENYMEFLEVLTEGLERVLLVRGGGREVITIYS

SEQ ID NO: 35733 - protein, 1139 aa, Homo sapiens
  REGION 1..1139: note = ENSP00000387694
MSRRFTVTSLPPAGPARSPDPESRRHSVADPRHLPGEDVKGDGNPKESSPFINSTDTEKGKEYDGKNMALFEEEMDTSPMVSSLLSGLANYTNLPQGSREHEEAENNEGGKKKPVQAPRMGTFMGVYLPCLQNIFGVILFLRLTWVVGIAGIMESFCMVFICCSCTMLTAISMSAIATNGVVPAGGSYYMISRSLGPEFGGAVGLCFYLGTTFAGAMYILGTIEILLAYLFPAMAIFKAEDASGEAAAMLNNMRVYGTCVLTCMATVVFVGVKYVNKFALVFLGCVILSILAIYAGVIKSAFDPPNFPICLLGNRTLSRHGFDVCAKLAWEGNETVTTRLWGLFCSSRFLNATCDEYFTRNNVTEIQGIPGAASGLIKENLWSSYLTKGVIVERSGMTSVGLADGTPIDMDHPYVFSDMTSYFTLLVGIYFPSVTGIMAGSNRSGDLRDAQKSIPTGTILAIATTSAVYISSVVLFGACIEGVVLRDKFGEAVNGNLVVGTLAWPSPWVIVIGSFFSTCGAGLQSLTGAPRLLQAISRDGIVPFLQVFGHGKANGEPTWALLLTACICEIGILIASLDEVAPILSMFFLMCYMFVNLACAVQTLLRTPNWRPRFRYYHWTLSFLGMSLCLALMFICSWYYALVAMLIAGLIYKYIEYRGAEKEWGDGIRGLSLSAARYALLRLEEGPPHTKNWRPQLLVLVRVDQDQNVVHPQLLSLTSQLKAGKGLTIVGSVLEGTFLENHPQAQRAEESIRRLMEAEKVKGFCQVVISSNLRDGVSHLIQSGGLGGLQHNTVLVGWPRNWRQKEDHQTWRNFIELVRETTAGHLALLVTKNVSMFPGNPERFSEGSIDVWWIVHDGGMLMLLPFLLRHHKVWRKCKMRIFTVAQMDDNSIQMKKDLTTFLYHLRITAEVEVVEMHESDISAYTYEKTLVMEQRSQILKQMHLTKNEREREIQSITDESRGSIRRKNPANTRLRLNVPEETAGDSEEKPEEEVQLIHDQSAPSCPSSSPSPGEEPEGEGETDPEKVHLTWTKDKSVAEKNKGPSPVSSEGIKDFFSMKPEWENLNQSNVRRMHTAVRLNEVIVKKSRDAKLVLLNMPGPPRNRNGDENYMEFLEVLTEHLDRVMLVRGGGREVITIYS

SEQ ID NO: 35734 - protein, 53 aa, Homo sapiens
  REGION 1..53: note = ENSP00000486382
MSRRFTVTSLPPAGPARSPDPESRRHSVADPRHLPGEDVKANPTDPHVLAIHL

SEQ ID NO: 35735 - protein, 120 aa, Homo sapiens
  REGION 1..120: note = ENSP00000487372
MSRRFTVTSLPPAGPARSPDPESRRHSVADPRHLPGEDVKVSPQGALIRGPLPGSEALGSGRNKANRLVVAPARGGGGGGGGGGGRGGGGRGGGRGGGGEGGGEASPDRQGSLPSRSKSN

SEQ ID NO: 35736 - protein, 67 aa, Homo sapiens
  REGION 1..67: note = ENSP00000487291
  VARIANT 1: note = Any amino acid
XHSVADPRHLPGEDVKVAPARGGGGGGGGGGGRGGGGRGGGRGGGGEGGGEASPDRQGSLPSRSKSN

SEQ ID NO: 35737 - protein, 123 aa, Homo sapiens
  REGION 1..123: note = ENSP00000476885
MALFEEEMDTSPMVSSLLSGLANYTNLPQGSREHEEAENNEGGKKKPVQAPRMGTFMGVYLPCLQNIFGVILFLRLTWVVGIAGIMESFCMVFICCSCTMLTAISMSAIATNGVVPAGGSYYM

SEQ ID NO: 35738 - protein, 180 aa, Homo sapiens
  REGION 1..180: note = ENSP00000485953
MLNNLTDCEDGDGGANPGDGNPKESSPFINSTDTEKGKEYDGKNMALFEEEMDTSPMVSSLLSGLANYTNLPQGSREHEEAENNEGGKKKPVQAPRMGTFMGVYLPCLQNIFGVILFLRLTWVVGIAGIMESFCMVFICCSCTMLTAISMSAIATNGVVPAGGSYYMISRLSGWQEQSFR

SEQ ID NO: 35739 - protein, 289 aa, Homo sapiens
  REGION 1..289: note = ENSP00000478369
MLNNLTDCEDGDGGANPGDGNPKESSPFINSTDTEKGKEYDGKNMALFEEEMDTSPMVSSLLSGLANYTNLPQGSREHEEAENNEGGKKKPVQAPRMGTFMGVYLPCLQNIFGVILFLRLTWVVGIAGIMESFCMVFICCSCTMLTAISMSAIATNGVVPAGGSYYMISRSLGPEFGGAVGLCFYLGTTFAGAMYILGTIEILLRREQPLLIGSYASWGQDRGGVLLKRKKPRGPRPTEEAPPRCLRWGAGVSPQSACRLLPVSHGSSPKTEIVELEGAPSPEFPPWDK

SEQ ID NO: 35740 - protein, 1116 aa, Homo sapiens
  REGION 1..1116: note = ENSP00000243964
MLNNLTDCEDGDGGANPGDGNPKESSPFINSTDTEKGKEYDGKNMALFEEEMDTSPMVSSLLSGLANYTNLPQGSREHEEAENNEGGKKKPVQAPRMGTFMGVYLPCLQNIFGVILFLRLTWVVGIAGIMESFCMVFICCSCTMLTAISMSAIATNGVVPAGGSYYMISRSLGPEFGGAVGLCFYLGTTFAGAMYILGTIEILLAYLFPAMAIFKAEDASGEAAAMLNNMRVYGTCVLTCMATVVFVGVKYVNKFALVFLGCVILSILAIYAGVIKSAFDPPNFPICLLGNRTLSRHGFDVCAKLAWEGNETVTTRLWGLFCSSRFLNATCDEYFTRNNVTEIQGIPGAASGLIKENLWSSYLTKGVIVERSGMTSVGLADGTPIDMDHPYVFSDMTSYFTLLVGIYFPSVTGIMAGSNRSGDLRDAQKSIPTGTILAIATTSAVYISSVVLFGACIEGVVLRDKFGEAVNGNLVVGTLAWPSPWVIVIGSFFSTCGAGLQSLTGAPRLLQAISRDGIVPFLQVFGHGKANGEPTWALLLTACICEIGILIASLDEVAPILSMFFLMCYMFVNLACAVQTLLRTPNWRPRFRYYHWTLSFLGMSLCLALMFICSWYYALVAMLIAGLIYKYIEYRGAEKEWGDGIRGLSLSAARYALLRLEEGPPHTKNWRPQLLVLVRVDQDQNVVHPQLLSLTSQLKAGKGLTIVGSVLEGTFLENHPQAQRAEESIRRLMEAEKVKGFCQVVISSNLRDGVSHLIQSGGLGGLQHNTVLVGWPRNWRQKEDHQTWRNFIELVRETTAGHLALLVTKNVSMFPGNPERFSEGSIDVWWIVHDGGMLMLLPFLLRHHKVWRKCKMRIFTVAQMDDNSIQMKKDLTTFLYHLRITAEVEVVEMHESDISAYTYEKTLVMEQRSQILKQMHLTKNEREREIQSITDESRGSIRRKNPANTRLRLNVPEETAGDSEEKPEEEVQLIHDQSAPSCPSSSPSPGEEPEGEGETDPEKVHLTWTKDKSVAEKNKGPSPVSSEGIKDFFSMKPEWENLNQSNVRRMHTAVRLNEVIVKKSRDAKLVLLNMPGPPRNRNGDENYMEFLEVLTEHLDRVMLVRGGGREVITIYS

SEQ ID NO: 35741 - protein, 58 aa, Homo sapiens
  REGION 1..58: note = ENSP00000487449
MLNNLTDCEDGDGGANPGDGNPKESSPFINSTDTEKGKEYDGKNMALFEPPSTDTLPP

SEQ ID NO: 35742 - protein, 186 aa, Homo sapiens
  REGION 1..186: note = ENSP00000446091
MLNNLTDCEDGDGGANPGDGNPKESSPFINSTDTEKGKEYDGKNMALFEEEMDTSPMVSSLLSGLANYTNLPQGSREHEEAENNEGGKKKPVQAPRMGTFMGVYLPCLQNIFGVILFLRLTWVVGIAGIMESFCMVFICCSCTMLTAISMSAIATNGVVPAGGSYYMISRSLAMARPMESRPGPCS

SEQ ID NO: 35743 - protein, 24 aa, Homo sapiens
  REGION 1..24: note = ENSP00000490442
  VARIANT 1: note = Any amino acid
XSRDAKLVLLNMPGPPRNRNGDEN

SEQ ID NO: 35744 - protein, 262 aa, Homo sapiens
  REGION 1..262: note = ENSP00000477569
MLNNLTDCEDGDGGANPGDGNPKESSPFINSTDTEKGKEYDGKNMALFEEEMDTSPMVSSLLSGLANYTNLPQGSREHEEAENNEGGKKKPVQAPRMGTFMGVYLPCLQNIFGVILFLRLTWVVGIAGIMESFCMVFICCSCTMLTAISMSAIATNGVVPAGGSYYMISRSLGPEFGGAVGLCFYLGTTFAGAMYILGTIEILLSLTLLPRLEGSGAVTDSLDFPGSNDPPHQFSLPSSWLTSSQPWPSSRQKMPVGRQQPC

SEQ ID NO: 35745 - protein, 459 aa, Homo sapiens [sequence omitted]

SEQ ID NO: 35746 - protein, 515 aa, Homo sapiens
  REGION 1..515: note = ENSP00000415713
MRRAAAGGLAVGQLPGEGPAGEEGAALGKAMRGGGCSPHSPSGCLSGVMAGFNMGGDLREPAASIPLGSLAAVGISWFLYIIFVFLLGAICTREALRYDFLIAEKVSLMGFLFLLGLYISSLASCMGGLYGAPRILQCIAQEKVIPALACLGQGKGPNKTPVAAICLTSLVTMAFVFVGQVNVLAPIVTINFMLTYVAVDYSYFSLSMCSCSLTPVPEPVLREGAEGLHCSEHLLLEKAPSYGSEGPAQRVLEGTLLEFTKDMDQLLQLTRKLESSQPRQGEGNRTPESQKRKSKKATKQTLQDSFLLDLKSPPSFPVEISDRLPAASWEGQESCWNKQTSKSEGTQPEGTYGEQLVPELCNQSESSGEDFFLKSRLQEQDVWRRSTSFYTHMCNPWVSLLGAVGSLLIMFVIQWVYTLVNMGVAAIVYFYIGRASPGLHLGSASNFSFFRWMRSLLLPSCRSLRSPQEQIILAPSLAKVDMEMTQLTQENADFATRDRYHHSSLVNREQLMPHY

SEQ ID NO: 35747 - protein, 714 aa, Homo sapiens
  REGION 1..714: note = ENSP00000377112
MTQMSQVQELFHEAAQQDALAQPQPWWKTQLFMWEPVLFGTWDGVFTSCMINIFGVVLFLRTGWLVGNTGVLLGMFLVSFVILVALVTVLSGIGVGERSSIGSGGVYSMISSVLGGQTGGTIGLLYVFGQCVAGAMYITGFAESISDLLGLGNIWAVRGISVAVLLALLGINLAGVKWIIRLQLLLLFLLAVSTLDFVVGSFTHLDPEHGFIGYSPELLQNNTLPDYSPGESFFTVFGVFFPAATGVMAGFNMGGDLREPAASIPLGSLAAVGISWFLYIIFVFLLGAICTREALRYDFLIAEKVSLMGFLFLLGLYISSLASCMGGLYGAPRILQCIAQEKVIPALACLGQGKGPNKTPVAAICLTSLVTMAFVFVGQVNVLAPIVTINFMLTYVAVDYSYFSLSMCSCSLTPVPEPVLREGAEGLHCSEHLLLEKAPSYGSEGPAQRVLEGTLLEFTKDMDQLLQLTRKLESSQPRQGEGNRTPESQKRKSKKATKQTLQDSFLLDLKSPPSFPVEISDRLPAASWEGQESCWNKQTSKSEGTQPEGTYGEQLVPELCNQSESSGEDFFLKSRLQEQDVWRRSTSFYTHMCNPWVSLLGAVGSLLIMFVIQWVYTLVNMGVAAIVYFYIGRASPGLHLGSASNFSFFRWMRSLLLPSCRSLRSPQEQIILAPSLAKVDMEMTQLTQENADFATRDRYHHSSLVNREQLMPHY

SEQ ID NO: 35748 - protein, 160 aa, Homo sapiens
  REGION 1..160: note = ENSP00000419424
  VARIANT 1: note = Any amino acid
XQDALAQPQPWWKTQLFMWEPVLFGTWDGVFTSCMINIFGVVLFLRTGWLVGNTGVLLGMFLVSFVILVALVTVLSGIGVGERSSIGSGGVYSMISSVLGGQTGGTIGLLYVFGQVPCISPALLNPSRICWASGISGLCEEFQLRCFWPCWALTSQVSNG

SEQ ID NO: 35749 - protein, 714 aa, Homo sapiens; identical to SEQ ID NO: 35747
  REGION 1..714: note = ENSP00000418783

SEQ ID NO: 35750 - protein, 207 aa, Homo sapiens
  REGION 1..207: note = ENSP00000420197
LGWCVHILHDQHLWGCALPEDWLAGGKHRSAPGHVPGVLRHPGGPRHGAVWHWRRGAQQHRQRWRLLHDLLGPGWADGRHHRAALCVWTEHGFIGYSPELLQNNTLPDYSPGESFFTVFGVFFPAATGVMAGFNMGGDLREPAASIPLGSLAAVGISWFLYIIFVFLLGAICTREALRYDFLIAEKVSLMGFLFLLGLYISSLASCM

SEQ ID NO: 35751 - protein, 112 aa, Homo sapiens
  REGION 1..112: note = ENSP00000418636
MWEPVLFGTWDGVFTSCMINIFGVVLFLRTGWLVGNTGVLLGMFLVSFVILVALVTVLSGIGVGERSSIGSGGVYSMISSVLGGQTGGTIGLLYVFGQCVAGAMYITGFAES

SEQ ID NO: 35752 - protein, 568 aa, Homo sapiens [sequence omitted]

SEQ ID NO: 35753 - protein, 551 aa, Homo sapiens
  REGION 1..551: note = ENSP00000293800
MASALSYVSKFKSFVILFVTPLLLLPLVILMPAKFVRCAYVIILMAIYWCTEVIPLAVTSLMPVLLFPLFQILDSRQVCVQYMKDTNMLFLGGLIVAVAVERWNLHKRIALRTLLWVGAKPARNTATTAMMVPIVEAILQQMEATSAATEAGLELVDKGKAKELPGSQVIFEGPTLGQQEDQERKRLCKAMTLCICYAASIGGTATLTGTGPNVVLLGQMNELFPDSKDLVNFASWFAFAFPNMLVMLLFAWLWLQFVYMRFNFKKSWGCGLESKKNEKAALKVLQEEYRKLGPLSFAEINVLICFFLLVILWFSRDPGFMPGWLTVAWVEGETKYVSDATVAIFVATLLFIVPSQKPKFNFRSQTEEERKTPFYPPPLLDWKVTQEKVPWGIVLLLGGGFALAKGSEASGLSVWMGKQMEPLHAVPPAAITLILSLLVAVFTECTSNVATTTLFLPIFASMSRSIGLNPLYIMLPCTLSASFAFMLPVATPPNAIVFTYGHLKVADMVKTGVIMNIIGVFCVFLAVNTWGRAIFDLDHFPDWANVTHIET

SEQ ID NO: 35754 - protein, 525 aa, Homo sapiens
  REGION 1..525: note = ENSP00000370464
MASALSYVSKFKSFVILFVTPLLLLPLVILMPAKVCVQYMKDTNMLFLGGLIVAVAVERWNLHKRIALRTLLWVGAKPARLMLGFMGVTALLSMWISNTATTAMMVPIVEAILQQMEATSAATEAGLELVDKGKAKELPGSQVIFEGPTLGQQEDQERKRLCKAMTLCICYAASIGGTATLTGTGPNVVLLGQMNELFPDSKDLVNFASWFAFAFPNMLVMLLFAWLWLQFVYMRFNFKKSWGCGLESKKNEKAALKVLQEEYRKLGPLSFAEINVLICFFLLVILWFSRDPGFMPGWLTVAWVEGETKYVSDATVAIFVATLLFIVPSQKPKFNFRSQTEEERKTPFYPPPLLDWKVTQEKVPWGIVLLLGGGFALAKGSEASGLSVWMGKQMEPLHAVPPAAITLILSLLVAVFTECTSNVATTTLFLPIFASMSRSIGLNPLYIMLPCTLSASFAFMLPVATPPNAIVFTYGHLKVADMVKTGVIMNIIGVFCVFLAVNTWGRAIFDLDHFPDWANVTHIET

SEQ ID NO: 35755 - protein, 522 aa, Homo sapiens
  REGION 1..522: note = ENSP00000459372
MASALSYVSKFKSFVILFVTPLLLLPLVILMPAKFVRCAYVIILMAIYWCTEVIPLAVTSLMPVLLFPLFQILDSRQVCVQYMKDTNMLFLGGLIVAVAVERWNLHKRIALRTLLWVGAKPARLMLGFMGVTALLSMWISNTATTAMMVPIVEAILQQMEATSAATEAGLELVDKGKAKELPGSQVIFEGPTLGQQEDQERKRLCKAMTLCICYAASIGGTATLTGTGPNVVLLGQMNELFPDSKDLVNFASWFAFAFPNMLVMLLFAWLWLQFVYMRFNFKKSWGCGLESKKNEKAALKVLQEEYRKLGPLSFAEINVLICFFLLVILWFSRDPGFMPGWLTVAWVEGETKYVSDATVAIFVATLLFIVPSQKPKFNFRSQTEEERKTPFYPPPLLDWKVTQEKVPWGIVLLLGGGFALAKGSEASGLSVWMGKQMEPLHAVPPAAITLILSLLVAVFTECTSNVATTTLFLPIFASMVKTGVIMNIIGVFCVFLAVNTWGRAIFDLDHFPDWANVTHIET

SEQ ID NO: 35756 - protein, 94 aa, Homo sapiens
  REGION 1..94: note = ENSP00000460037
  VARIANT 1: note = Any amino acid
XPAAITLILSLLVAVFTECTSNVATTTLFLPIFASMSRSIGLNPLYIMLPCTLSASFAFMLPVATPPNAIVFTYGHLKVADMVTQLFLFTPVGL

SEQ ID NO: 35757 - protein, 81 aa, Homo sapiens
  REGION 1..81: note = ENSP00000461495
MASALSYVSKFKSFVILFVTPLLLLPLVILMPAKFVRCAYVIILMAIYWCTEVIPLAVTSLMPVLLFPLFQILDSRCVSST

SEQ ID NO: 35758 - protein, 167 aa, Homo sapiens
  REGION 1..167: note = ENSP00000461622
MASALSYVSKFKSFVILFVTPLLLLPLVILMPAKILDSRQVCVQYMKDTNMLFLGGLIVAVAVERWNLHKRIALRTLLWVGAKPARLMLGFMGVTALLSMWISNTATTAMMVPIVEAILQQMEATSAATEAGLELVDKGKAKELPGSQVIFEGPTLGQQEDQERKRL

SEQ ID NO: 35759 - protein, 91 aa, Homo sapiens
  REGION 1..91: note = ENSP00000460903
MASALSYVSKFKSFVILFVTPLLLLPLVILMPAKFVRCAYVIILMAIYWCTEVIPLAVTSLMPVLLFPLFQILDSRQGDTTRACIPTPSCP

SEQ ID NO: 35760 - protein, 389 aa, Homo sapiens
  REGION 1..389: note = ENSP00000318546
MEDSPTMVRVDSPTMVRGENQVSPCQGRRCFPKALGYVTGDMKELANQLKDKPVVLQFIDWILRGISQVVFVNNPVSGILILVGLLVQNPWWALTGWLGTVVSTLMALLLSQDRSLIASGLYGYNATLVGVLMAVFSDKGDYFWWLLLPVCAMSMTCPIFSSALNSMLSKWDLPVFTLPFNMALSMYLSATGHYNPFFPAKLVIPITTAPNISWSDLSALELLKSIPVGVGQIYGCDNPWTGGIFLGAILLSSPLMCLHAAIGSLLGIAAGLSLSAPFEDIYFGLWGFNSSLACIAMGGMFMALTWQTHLLALGCALFTAYLGVGMANFMAEVGLPACTWPFCLATLLFLIMTTKNSNIYKMPLSKVTYPEENRIFYLQAKKRMVESPL

SEQ ID NO: 35761 - protein, 28 aa, Homo sapiens
  REGION 1..28: note = ENSP00000465029
MALLLSQDRSLIASGLYGYNATLVGVLM

SEQ ID NO: 35762 - protein, 281 aa, Homo sapiens
  REGION 1..281: note = ENSP00000442180
MGRRNRSLIASGLYGYNATLVGVLMAVFSDKGDYFWWLLLPVCAMSMTCPIFSSALNSMLSKWDLPVFTLPFNMALSMYLSATGHYNPFFPAKLVIPITTAPNISWSDLSALELLKSIPVGVGQIYGCDNPWTGGIFLGAILLSSPLMCLHAAIGSLLGIAAGLSLSAPFEDIYFGLWGFNSSLACIAMGGMFMALTWQTHLLALGCALFTAYLGVGMANFMAEVGLPACTWPFCLATLLFLIMTTKNSNIYKMPLSKVTYPEENRIFYLQAKKRMVESPL

SEQ ID NO: 35763 - protein, 102 aa, Homo sapiens
  REGION 1..102: note = ENSP00000465702
MEDSPTMVRVDSPTMVRGENQVSPCQGRRCFPKALGYVTGDMKELANQLKDKPVVLQFIDWILRGISQVVFVNNPVSGILILVGLLVQNPWWALTGWLGTVV

SEQ ID NO: 35764 - protein, 169 aa, Homo sapiens
  REGION 1..169: note = ENSP00000466273
MAVFSDKGDYFWWLLLPVCAMSMTCPIFSSALNSMLSKWDLPVFTLPFNMALSMYLSATGHYNPFFPAKLVIPITTAPNISWSDLSALELLKSIPVGVGQIYGCDNPWTGGIFLGAILLSSPLMCLHAAIGSLLGIAAGLSLSAPFEDIYFGLWGFNSSLACIAMGGMF

SEQ ID NO: 35765 - protein, 445 aa, Homo sapiens
  REGION 1..445: note = ENSP00000412309
MNGRSLIGGAGDARHGPVWKDPFGTKAGDAARRGIARLSLALADGSQEQEPEEEIAMEDSPTMVRVDSPTMVRGENQVSPCQGRRCFPKALGYVTGDMKELANQLKDKPVVLQFIDWILRGISQVVFVNNPVSGILILVGLLVQNPWWALTGWLGTVVSTLMALLLSQDRSLIASGLYGYNATLVGVLMAVFSDKGDYFWWLLLPVCAMSMTCPIFSSALNSMLSKWDLPVFTLPFNMALSMYLSATGHYNPFFPAKLVIPITTAPNISWSDLSALELLKSIPVGVGQIYGCDNPWTGGIFLGAILLSSPLMCLHAAIGSLLGIAAGLSLSAPFEDIYFGLWGFNSSLACIAMGGMFMALTWQTHLLALGCALFTAYLGVGMANFMAEVGLPACTWPFCLATLLFLIMTTKNSNIYKMPLSKVTYPEENRIFYLQAKKRMVESPL

SEQ ID NO: 35766 - protein, 257 aa, Homo sapiens
  REGION 1..257: note = ENSP00000441998
MAVFSDKGDYFWWLLLPVCAMSMTCPIFSSALNSMLSKWDLPVFTLPFNMALSMYLSATGHYNPFFPAKLVIPITTAPNISWSDLSALELLKSIPVGVGQIYGCDNPWTGGIFLGAILLSSPLMCLHAAIGSLLGIAAGLSLSAPFEDIYFGLWGFNSSLACIAMGGMFMALTWQTHLLALGCALFTAYLGVGMANFMAEVGLPACTWPFCLATLLFLIMTTKNSNIYKMPLSKVTYPEENRIFYLQAKKRMVESPL

SEQ ID NO: 35767 - protein, 284 aa, Homo sapiens
  REGION 1..284: note = ENSP00000385320
MALLLSQDRSLIASGLYGYNATLVGVLMAVFSDKGDYFWWLLLPVCAMSMTCPIFSSALNSMLSKWDLPVFTLPFNMALSMYLSATGHYNPFFPAKLVIPITTAPNISWSDLSALELLKSIPVGVGQIYGCDNPWTGGIFLGAILLSSPLMCLHAAIGSLLGIAAGLSLSAPFEDIYFGLWGFNSSLACIAMGGMFMALTWQTHLLALGCALFTAYLGVGMANFMAEVGLPACTWPFCLATLLFLIMTTKNSNIYKMPLSKVTYPEENRIFYLQAKKRMVESPL

SEQ ID NO: 35768 - protein, 214 aa, Homo sapiens
  REGION 1..214: note = ENSP00000467898
MNGRSLIGGAGDARHGPVWKDPFGTKAGDAARRGIARLSLALADGSQEQEPEEEIAMEDSPTMVRVDSPTMVRGENQVSPCQGRRCFPKALGYVTGDMKELANQLKDKPVVLQFIDWILRGISQVVFVNNPVSGILILVGLLVQNPWWALTGWLGTVVSTLMALLLSQDRSLIASGLYGYNATLVGVLMAVFSDKGDYFWWLLLPVCAMSMTCC

SEQ ID NO: 35769 - protein, 136 aa, Homo sapiens
  REGION 1..136: note = ENSP00000470055
MEDSPTMVRVDSPTMVRGENQVSPCQGRRCFPKALGYVTGDMKELANQLKDKPVVLQFIDWILRGISQVVFVNNPVSGILILVGLLVQNPWWALTGWLGTVVSTLMALLLSQDRSLIASGLYGYNATLVGVLMAVF

SEQ ID NO: 35770 - protein, 445 aa, Homo sapiens; identical to SEQ ID NO: 35765
  REGION 1..445: note = ENSP00000390637

SEQ ID NO: 35771 - protein, 129 aa, Homo sapiens
  REGION 1..129: note = ENSP00000466093
MNGRSLIGGAGDARHGPVWKDPFGTKAGDAARRGIARLSLALADGSQEQEPEEEIAMEDSPTMVRVDSPTMVRGENQVSPCQGRRCFPKALGYVTGDMKELANQLKDKPVVLQFIDWILRGISQVVFVN

SEQ ID NO: 35772 - protein, 116 aa, Homo sapiens
  REGION 1..116: note = ENSP00000468763
MALLLSQDRSLIASGLYGYNATLVGVLMAVFSDKGDYFWWLLLPVCAMSMTCPIFSSALNSMLSKWDLPVFTLPFNMALSMYLSATGHYNPFFPAKLVIPITTAPNISWSDLSALE

SEQ ID NO: 35773 - protein, 389 aa, Homo sapiens; identical to SEQ ID NO: 35760
  REGION 1..389: note = ENSP00000470476

SEQ ID NO: 35774 - protein, 302 aa, Homo sapiens
  REGION 1..302: note = ENSP00000465044
MEDSPTMVRVDSPTMVRGENQVSPCQGRRCFPKALGYVTGDMKELANQLKDKPVVLQFIDWILRGISQVVFVNNPVSGILILVGLLVQNPWWALTGWLGTVVSTLMALLLSQDRSLIASGLYGYNATLVGVLMAVFSDKGDYFWWLLLPVCAMSMTCPIFSSALNSMLSKWDLPVFTLPFNMALSMYLSATGHYNPFFPAKLVIPITTAPNISWSDLSALEDSVFQPHLRTSTLDSGVSTALWPALQWEECSWRSPGKPTSWLLAVPCSRPILESAWQTLWLRLDCQLVPGPSVWPRYCSSS

SEQ ID NO: 35775 - protein, 173 aa, Homo sapiens
  REGION 1..173: note = ENSP00000465150
  VARIANT 1: note = Any amino acid
XLTGWLGTVVSTLMALLLSQDRSLIASGLYGYNATLVGVLMAVFSDKGDYFWWLLLPVCAMSMTCPIFSSALNSMLSKWDLPVFTLPFNMALSMYLSATGHYNPFFPAKLVIPITTAPNISWSDLSALEPCSRPILESAWQTLWLRERVKEELWGKKSKHNQRSSAVKNLGCG

SEQ ID NO: 35776 - protein, 302 aa, Homo sapiens; identical to SEQ ID NO: 35774
  REGION 1..302: note = ENSP00000479595

SEQ ID NO: 35777 - protein, 920 aa, Homo sapiens
  REGION 1..920: note = ENSP00000465953
MSDPHSSPLLPEPLSSRYKLYEAEFTSPSWPSTSPDTHPALPLLEMPEEKDLRSSNEDSHIVKIEKLNERSKRKDDGVAHRDSAGQRCICLSKAVGYLTGDMKEYRIWLKDKHLALQFIDWVLRGTAQVMFINNPLSGLIIFIGLLIQNPWWTITGGLGTVVSTLTALALGQDRSAIASGLHGYNGMLVGLLMAVFSEKLDYYWWLLFPVTFTAMSCPVLSSALNSIFSKWDLPVFTLPFNIAVTLYLAATGHYNLFFPTTLVEPVSSVPNITWTEMEMPLLLQAIPVGVGQVYGCDNPWTGGVFLVALFISSPLICLHAAIGSIVGLLAALSVATPFETIYTGLWSYNCVLSCIAIGGMFYALTWQTHLLALICALFCAYMEAAISNIMSVVGVPPGTWAFCLATIIFLLLTTNNPAIFRLPLSKVTYPEANRIYYLTVKSGEEEKAPSGGGGEHPPTAGPKVEEGSEAVLSKHRSVFHIEWSSIRRRSKVFGKGEHQERQNKDPFPYRYRKPTVELLDLDTMEESSEIKVETNISKTSWIRSSMAASGKRVSKALSYITGEMKECGEGLKDKSPVFQFFDWVLRGTSQVMFVNNPLSGILIILGLFIQNPWWAISGCLGTIMSTLTALILSQDKSAIAAGFHGYNGVLVGLLMAVFSDKGDYYWWLLLPVIIMSMSCPILSSALGTIFSKWDLPVFTLPFNITVTLYLAATGHYNLFFPTTLLQPASAMPNITWSEVQVPLLLRAIPVGIGQVYGCDNPWTGGIFLIALFISSPLICLHAAIGSTMGMLAALTIATPFDSIYFGLCGFNSTLACIAIGGMFYVITWQTHLLAIACALFAAYLGAALANMLSVFGLPPCTWPFCLSALTFLLLTTNNPAIYKLPLSKVTYPEANRIYYLSQERNRRASIITKYQAYDVS

SEQ ID NO: 35778 - protein, 920 aa, Homo sapiens; identical to SEQ ID NO: 35777
  REGION 1..920: note = ENSP00000255226

SEQ ID NO: 35779 - protein, 235 aa, Homo sapiens
  REGION 1..235: note = ENSP00000320689
MSDPHSSPLLPEPLSSRYKLYEAEFTSPSWPSTSPDTHPALPLLEMPEEKDLRSSNEDSHIVKIEKLNERSKRKDDGVAHRDSAGQRCICLSKAVGYLTGDMKEYRIWLKDKHLALQFIDWVLRGTAQVMFINNPLSGLIIFIGLLIQNPWWTITGGLGTVVSTLTALALGQDRSAIASGLHGYNGMLVGLLMAVFSEKLDYYWWLLFPVTFTAMSWMETDFNWSKSGCWKHLLQ

SEQ ID NO: 35780 - protein, 729 aa, Homo sapiens
  REGION 1..729: note = ENSP00000417085
MNPFQKNESKETLFSPVSIEEVPPRPPSPPKKPSPTICGSNYPLSIAFIVVNEFCERFSYYGMKAVLILYFLYFLHWNEDTSTSIYHAFSSLCYFTPILGAAIADSWLGKFKTIIYLSLVYVLGHVIKSLGALPILGGQVVHTVLSLIGLSLIALGTGGIKPCVAAFGGDQFEEKHAEERTRYFSVFYLSINAGSLISTFITPMLRGDVQCFGEDCYALAFGVPGLLMVIALVVFAMGSKIYNKPPPEGNIVAQVFKCIWFAISNRFKNRSGDIPKRQHWLDWAAEKYPKQLIMDVKALTRVLFLYIPLPMFWALLDQQGSRWTLQAIRMNRNLGFFVLQPDQMQVLNPLLVLIFIPLFDFVIYRLVSKCGINFSSLRKMAVGMILACLAFAVAAAVEIKINEMAPAQPGPQEVFLQVLNLADDEVKVTVVGNENNSLLIESIKSFQKTPHYSKLHLKTKSQDFHFHLKYHNLSLYTEHSVQEKNWYSLVIREDGNSISSMMVKDTESRTTNGMTTVRFVNTLHKDVNISLSTDTSLNVGEDYGVSAYRTVQRGEYPAVHCRTEDKNFSLNLGLLDFGAAYLFVITNNTNQGLQAWKIEDIPANKMSIAWQLPQYALVTAGEVMFSVTGLEFSYSQAPSSMKSVLQAAWLLTIAVGNIIVLVVAQFSGLVQWAEFILFSCLLLVICLIFSIMGYYYVPVKTEDMRGPADKHIPHIQGNMIKLETKKTKL

SEQ ID NO: 35781 - protein, 698 aa, Homo sapiens
  REGION 1..698: note = ENSP00000295605
MNPFQKNESKETLFSPVSIEEVPPRPPSPPKKPSPTICGSNYPLSIAFIVVNEFCERFSYYGMKAVLILYFLYFLHWNEDTSTSIYHAFSSLCYFTPILGAAIADSWLGKFKVLSLIGLSLIALGTGGIKPCVAAFGGDQFEEKHAEERTRYFSVFYLSINAGSLISTFITPMLRGDVQCFGEDCYALAFGVPGLLMVIALVVFAMGSKIYNKPPPEGNIVAQVFKCIWFAISNRFKNRSGDIPKRQHWLDWAAEKYPKQLIMDVKALTRVLFLYIPLPMFWALLDQQGSRWTLQAIRMNRNLGFFVLQPDQMQVLNPLLVLIFIPLFDFVIYRLVSKCGINFSSLRKMAVGMILACLAFAVAAAVEIKINEMAPAQPGPQEVFLQVLNLADDEVKVTVVGNENNSLLIESIKSFQKTPHYSKLHLKTKSQDFHFHLKYHNLSLYTEHSVQEKNWYSLVIREDGNSISSMMVKDTESRTTNGMTTVRFVNTLHKDVNISLSTDTSLNVGEDYGVSAYRTVQRGEYPAVHCRTEDKNFSLNLGLLDFGAAYLFVITNNTNQGLQAWKIEDIPANKMSIAWQLPQYALVTAGEVMFSVTGLEFSYSQAPSSMKSVLQAAWLLTIAVGNIIVLVVAQFSGLVQWAEFILFSCLLLVICLIFSIMGYYYVPVKTEDMRGPADKHIPHIQGNMIKLETKKTKL

SEQ ID NO: 35782 - protein, 152 aa, Homo sapiens
  REGION 1..152: note = ENSP00000418704
MKAVLILYFLYFLHWNEDTSTSIYHAFSSLCYFTPILGAAIADSWLGKFKTIIYLSLVYVLGHVIKSLGALPILGGQVVHTVLSLIGLSLIALGTGGIKPCVAAFGGDQFEEKHAEERTRYFSVFYLSINAGSLISTFITPMLRGDVQCFGE

SEQ ID NO: 35783 - protein, 515 aa, Homo sapiens
  REGION 1..515: note = ENSP00000357844
MVLSQEEPDSARGTSEAQPLGPAPTGAAPPPGPGPSDSPEAAVEKVEVELAGPATAEPHEPPEPPEGGWGWLVMLAAMWCNGSVFGIQNACGVLFVSMLETFGSKDDDKMVFKTAWVGSLSMGMIFFCCPIVSVFTDLFGCRKTAVVGAAVGFVGLMSSSFVSSIEPLYLTYGIIFACGCSFAYQPSLVILGHYFKKRLGLVNGIVTAGSSVFTILLPLLLRVLIDSVGLFYTLRVLCIFMFVLFLAGFTYRPLATSTKDKESGGSGSSLFSRKKFSPPKKIFNFAIFKVTAYAVWAVGIPLALFGYFVPYVHLMKHVNERFQDEKNKEVVLMCIGVTSGVGRLLFGRIADYVPGVKKVYLQVLSFFFIGLMSMMIPLCSIFGALIAVCLIMGLFDGCFISIMAPIAFELVGAQDVSQAIGFLLGFMSIPMTVGPPIAGLLRDKLGSYDVAFYLAGVPPLIGGAVLCFIPWIHSKKQREISKTTGKEKMEKMLENQNSLLSSSSGMFKKESDSII

SEQ ID NO: 35784 - protein, 206 aa, Homo sapiens
  REGION 1..206: note = ENSP00000387501
  VARIANT 1: note = Any amino acid
XWVGSLSMGMIFFCCPIVSVFTDLFGCRKTAVVGAAVGFVGLMSSSFVSSIEPLYLTYGIIFACGCSFAYQPSLVILGHYFKKRLGLVNGIVTAGSSVFTILLPLLLRVLIDSVGLFYTLRVLCIFMFVLFLAGFTYRPLATSTKDKESGGSGSSLFSRKKFSPPKKIFNFAIFKVTAYAVWAVGIPLALFGYFVPYVHLVSMLLH

SEQ ID NO: 35785 - protein, 211 aa, Homo sapiens
  REGION 1..211: note = ENSP00000399601
  VARIANT 1: note = Any amino acid
XWVGSLSMGMIFFCCPIVSVFTDLFGCRKTAVVGAAVGFVGLMSSSFVSSIEPLYLTYGIIFACGCSFAYQPSLVILGHYFKKRLGLVNGIVTAGSSVFTILLPLLLRVLIDSVGLFYTLRVLCIFMFVLFLAGFTYRPLATSTKDKESGGSGSSLFSRKKFSPPKKIFNFAIFKVTAYAVWAVGIPLALFGYFVPYVHLAKFSFVILKYE

SEQ ID NO: 35786 - protein, 201 aa, Homo sapiens
  REGION 1..201: note = ENSP00000357843
MKHVNERFQDEKNKEVVLMCIGVTSGVGRLLFGRIADYVPGVKKVYLQVLSFFFIGLMSMMIPLCSIFGALIAVCLIMGLFDGCFISIMAPIAFELVGAQDVSQAIGFLLGFMSIPMTVGPPIAGLLRDKLGSYDVAFYLAGVPPLIGGAVLCFIPWIHSKKQREISKTTGKEKMEKMLENQNSLLSSSSGMFKKESDSII

SEQ ID NO: 35787 - protein, 326 aa, Homo sapiens
  REGION 1..326: note = ENSP00000483868
MVLSQEEPDSARGTSEAQPLGPAPTGAAPPPGPGPSDSPEAAVEKVEVELAGPATAEPHEPPEPPEGGWGWLVMLAAMWCNGSVFGIQNACGVLFVSMLETFGSKDDDKMVFKTAWVGSLSMGMIFFCCPIVSVFTDLFGCRKTAVVGAAVGFVGLMSSSFVSSIEPLYLTYGIIFACGCSFAYQPSLVILGHYFKKRLGLVNGIVTAGSSVFTILLPLLLRVLIDSVGLFYTLRVLCIFMFVLFLAGFTYRPLATSTKDKESGGSGSSLFSRKKFSPPKNFQFCHLQGDSLCSVGSWNTTCTFWILCALCSLGEYAPSLIMNITI

SEQ ID NO: 35788 - protein, 497 aa, Homo sapiens
  REGION 1..497: note = ENSP00000367137
MSTGPDVKATVGDISSDGNLNVAQEECSRKGFCSVRHGLALILQLCNFSIYTQQMNLSIAIPAMVNNTAPPSQPNASTERPSTDSQGYWNETLKEFKAMAPAYDWSPEIQGIILSSLNYGSFLAPIPSGYVAGIFGAKYVVGAGLFISSFLTLFIPLAANAGVALLIVLRIVQGIAQVMVLTGQYSIWVKWAPPLERSQLTTIAGSGSMLGSFIVLLAGGLLCQTIGWPYVFYIFGGIGCACCPLWFPLIYDDPVNHPFISAGEKRYIVCSLAQQDCSPGWSLPIRAMIKSLPLWAILVSYFCEYWLFYTIMAYTPTYISSVLQANLRDSGILSALPFVVGCICIILGGLLADFLLSRKILRLITIRKLFTAIGVLFPSVILVSLPWVRSSHSMTMTFLVLSSAISSFCESGALVNFLDIAPRYTGFLKGLLQVFAHIAGAISPTAAGFFISQDSEFGWRNVFLLSAAVNISGLVFYLIFGRADVQDWAKEQTFTHL

SEQ ID NO: 35789 - protein, 443 aa, Homo sapiens
  REGION 1..443: note = ENSP00000391345
MNLSIAIPAMVNNTAPPSQPNASTERPSTDSQGYWNETLKEFKAMAPAYDWSPEIQGIILSSLNYGSFLAPIPSGYVAGIFGAKYVVGAGLFISSFLTLFIPLAANAGVALLIVLRIVQGIAQVMVLTGQYSIWVKWAPPLERSQLTTIAGSGSMLGSFIVLLAGGLLCQTIGWPYVFYIFGGIGCACCPLWFPLIYDDPVNHPFISAGEKRYIVCSLAQQDCSPGWSLPIRAMIKSLPLWAILVSYFCEYWLFYTIMAYTPTYISSVLQANLRDSGILSALPFVVGCICIILGGLLADFLLSRKILRLITIRKLFTAIGVLFPSVILVSLPWVRSSHSMTMTFLVLSSAISSFCESGALVNFLDIAPRYTGFLKGLLQVFAHIAGAISPTAAGFFISQDSEFGWRNVFLLSAAVNISGLVFYLIFGRADVQDWAKEQTFTHL

SEQ ID NO: 35790 - protein, 221 aa, Homo sapiens
  REGION 1..221: note = ENSP00000380266
MNLSIAIPAMVNNTAPPSQPNASTERPSTDSQGYWNETLKEFKAMDCSPGWSLPIRAMIKSLPLWAILVSYFCEYWLFYTIMAYTPTYISSVLQANLRDSGILSALPFVVGCICIILGGLLADFLLSRKILRLITIRKLFTAIGKGETGHRGERGKLRAAFSLLCVCPPTPGVLFPSVILVSLPWVRSSHSMTMTFLVLSSAISSFCESGALVNFLDIAPR

SEQ ID NO: 35791 - protein, 560 aa, Homo sapiens
  REGION 1..560: note = ENSP00000221485
MEFRQEEFRKLAGRALGKLHRLLEKRQEGAETLELSADGRPVTTQTRDPPVVDCTCFGLPRRYIIAIMSGLGFCISFGIRCNLGVAIVSMVNNSTTHRGGHVVVQKAQFSWDPETVGLIHGSFFWGYIVTQIPGGFICQKFAANRVFGFAIVATSTLNMLIPSAARVHYGCVIFVRILQGLVEGVTYPACHGIWSKWAPPLERSRLATTAFCGSYAGAVVAMPLAGVLVQYSGWSSVFYVYGSFGIFWYLFWLLVSYESPALHPSISEEERKYIEDAIGESAKLMNPLTKFSTPWRRFFTSMPVYAIIVANFCRSWTFYLLLISQPAYFEEVFGFEISKVGLVSALPHLVMTIIVPIGGQIADFLRSRRIMSTTNVRKLMNCGGFGMEATLLLVVGYSHSKGVAISFLVLAVGFSGFAISGFNVNHLDIAPRYASILMGISNGVGTLSGMVCPIIVGAMTKHKTREEWQYVFLIASLVHYGGVIFYGVFASGEKQPWAEPEEMSEEKCGFVGHDQLAGSDDSEMEDEAEPPGAPPAPPPSYGATHSTFQPPRPPPPVRDY

SEQ ID NO: 35792 - protein, 493 aa, Homo sapiens
  REGION 1..493: note = ENSP00000470338
MSGLGFCISFGIRCNLGVAIVSMVNNSTTHRGGHVVVQKAQFSWDPETVGLIHGSFFWGYIVTQIPGGFICQKFAANRVFGFAIVATSTLNMLIPSAARVHYGCVIFVRILQGLVEGVTYPACHGIWSKWAPPLERSRLATTAFCGSYAGAVVAMPLAGVLVQYSGWSSVFYVYGSFGIFWYLFWLLVSYESPALHPSISEEERKYIEDAIGESAKLMNPLTKFSTPWRRFFTSMPVYAIIVANFCRSWTFYLLLISQPAYFEEVFGFEISKVGLVSALPHLVMTIIVPIGGQIADFLRSRRIMSTTNVRKLMNCGGFGMEATLLLVVGYSHSKGVAISFLVLAVGFSGFAISGFNVNHLDIAPRYASILMGISNGVGTLSGMVCPIIVGAMTKHKTREEWQYVFLIASLVHYGGVIFYGVFASGEKQPWAEPEEMSEEKCGFVGHDQLAGSDDSEMEDEAEPPGAPPAPPPSYGATHSTFQPPRPPPPVRDY

SEQ ID NO: 35793 - protein, 116 aa, Homo sapiens
  REGION 1..116: note = ENSP00000472086
  VARIANT 1: note = Any amino acid
XWSKWAPPLERSRLATTAFCGSYAGAVVAMPLAGVLVQYSGWSSVFYVYGSFGIFWYLFWLLVSYESPALHPSISEEERKYIEDAIGESAKLMNPLTNYTVVPEGTRRSPQPRSPS

SEQ ID NO: 35794 - protein, 269 aa, Homo sapiens
  REGION 1..269: note = ENSP00000393988
  VARIANT 1: note = Any amino acid
XLRLWSLWWVFNSAGYYLVVYYVHILWNEVDPTTNSARVYNGAADAASTLLGAITSFAAGFVKIRWARWSKLLIAGVTATQAGLVFLLAHTRHPSSIWLCYAAFVLFRGSYQFLVPIATFQIASSLSKELCALVFGVNTFFATIVKTIITFIVSDVRGLGLPVRKQALRMSRPRLGLCLPGPFPPQSAAPARAGMAASSAEDPGSERGPWRRAGTVAARGDPGGERGPWRREGTLAARGDPGGERGPWWREGTLAAKPRMQWVTRATAP

SEQ ID NO: 35795 - protein, 545 aa, Homo sapiens
  REGION 1..545: note = ENSP00000457278
MVPSSPAVEKQVPVEPGPDPELRSWRHLVCYLCFYGFMAQIRPGESFITPYLLGPDKNFTREQVTNEITPVLSYSYLAVLVPVFLLTDYLRYTPVLLLQGLSFVSVWLLLLLGHSVAHMQLMELFYSVTMAARIAYSSYIFSLVRPARYQRVAGYSRAAVLLGVFTSSVLGQLLVTVGRVSFSTLNYISLAFLTFSVVLALFLKRPKRSLFFNRDDRGRCETSASELERMNPGPGGKLGHALRVACGDSVLARMLRELGDSLRRPQLRLWSLWWVFNSAGYYLVVYYVHILWNEVDPTTNSARVYNGAADAASTLLGAITSFAAGFVKIRWARWSKLLIAGVTATQAGLVFLLAHTRHPSSIWLCYAAFVLFRGSYQFLVPIATFQIASSLSKELCALVFGVNTFFATIVKTIITFIVSDVRGLGLPVRKQALRMSRPRLGLCLPGPFPPQSAAPARAGMAASSAEDPGSERGPWRRAGTVAARGDPGGERGPWRREGTLAARGDPGGERGPWWREGTLAVRGDPGGERGPWRREGTLVVKGARG

SEQ ID NO: 35796 - protein, 591 aa, Homo sapiens
  REGION 1..591: note = ENSP00000308895
MVPSSPAVEKQVPVEPGPDPELRSWRHLVCYLCFYGFMAQIRPGESFITPYLLGPDKNFTREQVTNEITPVLSYSYLAVLVPVFLLTDYLRYTPVLLLQGLSFVSVWLLLLLGHSVAHMQLMELFYSVTMAARIAYSSYIFSLVRPARYQRVAGYSRAAVLLGVFTSSVLGQLLVTVGRVSFSTLNYISLAFLTFSVVLALFLKRPKRSLFFNRDDRGRCETSASELERMNPGPGGKLGHALRVACGDSVLARMLRELGDSLRRPQLRLWSLWWVFNSAGYYLVVYYVHILWNEVDPTTNSARVYNGAADAASTLLGAITSFAAGFVKIRWARWSKLLIAGVTATQAGLVFLLAHTRHPSSIWLCYAAFVLFRGSYQFLVPIATFQIASSLSKELCALVFGVNTFFATIVKTIITFIVSDVRGLGLPVRKQFQLYSVYFLILSIIYFLGAMLDGLRHCQRGHHPRQPPAQGLRSAAEEKAAQALSVQDKGLGGLQPAQSPPLSPEDSLGAVGPASLEQRQSDPYLAQAPAPQAAEFLSPVTTPSPCTLCSAQASGPEAADETCPQLAVHPPGVSKLGLQCLPSDGVQNVNQ

SEQ ID NO: 35797 - protein, 489 aa, Homo sapiens
  REGION 1..489: note = ENSP00000369347
MVPSSPAVEKQVPVEPGPDPELRSWRHLVCYLCFYGFMAQIRPGESFITPYLLGPDKNFTREQVTNEITPVLSYSYLAVLVPVFLLTDYLRYTPVLLLQGLSFVSVWLLLLLGHSVAHMQLMELFYSVTMAARIAYSSYIFSLVRPARYQRVAGYSRAAVLLGVFTSSVLGQLLVTVGRVSFSTLNYISLAFLTFSVVLALFLKRPKRSLFFNRDDRGRCETSASELERMNPGPGGKLGHALRVACGDSVLARMLRELGDSLRRPQLRLWSLWWVFNSAGYYLVVYYVHILWNEVDPTTNSARVYNGAADAASTLLGAITSFAAGFVKIRWARWSKLLIAGVTATQAGLVFLLAHTRHPSSIWLCYAAFVLFRGSYQFLVPIATFQIASSLSKELCALVFGVNTFFATIVKTIITFIVSDVRGLGLPVRKQNEELHVASLSLWKSHLRLAADTLSSEGSSGSGPRSWFLSPTLRAALHGPVCPSEVCPS

SEQ ID NO: 35798 - protein, 551 aa, Homo sapiens
  REGION 1..551: note = ENSP00000441772
MRPQPAEPAPGGRGNEACSIHSEVTNEITPVLSYSYLAVLVPVFLLTDYLRYTPVLLLQGLSFVSVWLLLLLGHSVAHMQLMELFYSVTMAARIAYSSYIFSLVRPARYQRVAGYSRAAVLLGVFTSSVLGQLLVTVGRVSFSTLNYISLAFLTFSVVLALFLKRPKRSLFFNRDDRGRCETSASELERMNPGPGGKLGHALRVACGDSVLARMLRELGDSLRRPQLRLWSLWWVFNSAGYYLVVYYVHILWNEVDPTTNSARVYNGAADAASTLLGAITSFAAGFVKIRWARWSKLLIAGVTATQAGLVFLLAHTRHPSSIWLCYAAFVLFRGSYQFLVPIATFQIASSLSKELCALVFGVNTFFATIVKTIITFIVSDVRGLGLPVRKQFQLYSVYFLILSIIYFLGAMLDGLRHCQRGHHPRQPPAQGLRSAAEEKAAQALSVQDKGLGGLQPAQSPPLSPEDSLGAVGPASLEQRQSDPYLAQAPAPQAAEFLSPVTTPSPCTLCSAQASGPEAADETCPQLAVHPPGVSKLGLQCLPSDGVQNVNQ

SEQ ID NO: 35799 - protein, 182 aa, Homo sapiens
  REGION 1..182: note = ENSP00000401850
MVPSSPAVEKQVPVEPGPDPELRSWRHLVCYLCFYGFMAQIRPGESFITPYLLGPDKNFTREQVTNEITPVLSYSYLAVLVPVFLLTDYLRYTPVLLLQGLSFVSVWLLLLLGHSVAHMQLMELFYSVTMAARIAYSSYIFSLVRPARYQRVAGYSRAAVLLGVFTSSVLGQLLVTVGRVSF

SEQ ID NO: 35800 - protein, 154 aa, Homo sapiens
  REGION 1..154: note = ENSP00000411345
MVPSSPAVEKQVPVEPGPDPELRSWRHLVCYLCFYGFMAQIRPGESFITPYLLGPDKNFTREQVTNEITPVLSYSYLAVLVPVFLLTDYLRYTPVLLLQGLSFVSVWLLLLLGHSVAHMQLMELFYSVTMAARIAYSSYIFSLVRPARYQRVAG

SEQ ID NO: 35801 - protein, 60 aa, Homo sapiens
  REGION 1..60: note = ENSP00000435780
MVPSSPAVEKQVPVEPGPDPELRSWRHLVCYLCFYGFMAQIRPGESFITPYLLGPDKNFT

SEQ ID NO: 35802 - protein, 497 aa, Homo sapiens
  REGION 1..497: note = ENSP00000236137
MDVPGPVSRRAAAAAATVLLRTARVRRECWFLPTALLCAYGFFASLRPSEPFLTPYLLGPDKNLTEREVFNEIYPVWTYSYLVLLFPVFLATDYLRYKPVVLLQGLSLIVTWFMLLYAQGLLAIQFLEFFYGIATATEIAYYSYIYSVVDLGMYQKVTSYCRSATLVGFTVGSVLGQILVSVAGWSLFSLNVISLTCVSVAFAVAWFLPMPQKSLFFHHIPSTCQRVNGIKVQNGGIVTDTPASNHLPGWEDIESKIPLNMEEPPVEEPEPKPDRLLVLKVLWNDFLMCYSSRPLLCWSVWWALSTCGYFQVVNYTQGLWEKVMPSRYAAIYNGGVEAVSTLLGAVAVFAVGYIKISWSTWGEMTLSLFSLLIAAAVYIMDTVGNIWVCYASYVVFRIIYMLLITIATFQIAANLSMERYALVFGVNTFIALALQTLLTLIVVDASGLGLEITTQFLIYASYFALIAVVFLASGAVSVMKKCRKLEDPQSSSQVTTS

SEQ ID NO: 35803 - protein, 296 aa, Homo sapiens
  REGION 1..296: note = ENSP00000356778
MDVPGPVSRRAAAAAATVLLRTARVRRECWFLPTALLCAYGFFASLRPSEPFLTPYLLGPDKNLTEREEPKPDRLLVLKVLWNDFLMCYSSRPLLCWSVWWALSTCGYFQVVNYTQGLWEKVMPSRYAAIYNGGVEAVSTLLGAVAVFAVGYIKISWSTWGEMTLSLFSLLIAAAVYIMDTVGNIWVCYASYVVFRIIYMLLITIATFQIAANLSMERYALVFGVNTFIALALQTLLTLIVVDASGLGLEITTQFLIYASYFALIAVVFLASGAVSVMKKCRKLEDPQSSSQVTTS

SEQ ID NO: 35804 - protein, 524 aa, Homo sapiens
  REGION 1..524: note = ENSP00000262352
MGKPARKGCEWKRFLKNNWVLLSTVAAVVLGITTGVLVREHSNLSTLEKFYFAFPGEILMRMLKLIILPLIISSMITGVAALDSNVSGKIGLRAVVYYFCTTLIAVILGIVLVVSIKPGVTQKVGEIARTGSTPEVSTVDAMLDLIRNMFPENLVQACFQQYKTKREEVKPPSDPEMNMTEESFTAVMTTAISKNKTKEYKIVGMYSDGINVLGLIVFCLVFGLVIGKMGEKGQILVDFFNALSDATMKIVQIIMCYMPLGILFLIAGKIIEVEDWEIFRKLGLYMATVLTGLAIHSIVILPLIYFIVVRKNPFRFAMGMAQALLTALMISSSSATLPVTFRCAEENNQVDKRITRFVLPVGATINMDGTALYEAVAAVFIAQLNDLDLGIGQIITISITATSASIGAAGVPQAGLVTMVIVLSAVGLPAEDVTLIIAVDWLLDRFRTMVNVLGDAFGTGIVEKLSKKELEQMDVSSEVNIVNPFALESTILDNEDSDTKKSYVNGGFAVDKSDTISFTQTSQF

SEQ ID NO: 35805 - protein, 242 aa, Homo sapiens
  REGION 1..242: note = ENSP00000414620
  VARIANT 1: note = Any amino acid
XFFNALSDATMKIVQIIMCYMPLGILFLIAGKIIEVEDWEIFRKLGLYMATVLTGLAIHSIVILPLIYFIVVRKNPFRFAMGMAQALLTALMISSSSATLPVTFRCAEENNQVDKRITRFVLPVGATINMDGTALYEAVAAVFIAQLNDLDLGIGQIITIRDRFRTMVNVLGDAFGTGIVEKLSKKELEQMDVSSEVNIVNPFALESTILDNEDSDTKKSYVNGGFAVDKSDTISFTQTSQF

SEQ ID NO: 35806 - protein, 234 aa, Homo sapiens
  REGION 1..234: note = ENSP00000431942
MNILGLVLFALVLGVALKKLGSEGEDLIRFFNSLNEATMVLVSWIMCSATLPSMMKCIEENNGVDKRISRFILPIGATVNMDGAAIFQCVAAVFIAQLNNVELNAGQIFTILVTATASSVGAAGVPAGGVLTIAIILEAIGLPTHDLPLILAVDWIVDRTTTVVNVEGDALGAGILHHLNQKATKKGEQELAEVKVEAIPNCKSEEETSPLVTHQNPAGPVASAPELESKESVL

SEQ ID NO: 35807 - protein, 532 aa, Homo sapiens
  REGION 1..532: note = ENSP00000234256
MEKSNETNGYLDSAQAGPAAGPGAPGTAAGRARRCAGFLRRQALVLLTVSGVLAGAGLGAALRGLSLSRTQVTYLAFPGEMLLRMLRMIILPLVVCSLVSGAASLDASCLGRLGGIAVAYFGLTTLSASALAVALAFIIKPGSGAQTLQSSDLGLEDSGPPPVPKETVDSFLDLARNLFPSNLVVAAFRTYATDYKVVTQNSSSGNVTHEKIPIGTEIEGMNILGLVLFALVLGVALKKLGSEGEDLIRFFNSLNEATMVLVSWIMWYVPVGIMFLVGSKIVEMKDIIVLVTSLGKYIFASILGHVIHGGIVLPLIYFVFTRKNPFRFLLGLLAPFATAFATCSSSATLPSMMKCIEENNGVDKRISRFILPIGATVNMDGAAIFQCVAAVFIAQLNNVELNAGQIFTILVTATASSVGAAGVPAGGVLTIAIILEAIGLPTHDLPLILAVDWIVDRTTTVVNVEGDALGAGILHHLNQKATKKGEQELAEVKVEAIPNCKSEEETSPLVTHQNPAGPVASAPELESKESVL

SEQ ID NO: 35808 - protein, 500 aa, Homo sapiens
  REGION 1..500: note = ENSP00000409386
MSIDHEQPWQQPVPAGERPAAGPGGLAAAAAGKPAAESTAHAPAPADHDPRARAALPAPKRLHSADGQRRGHWGQPGLCPAPISAHLPPDQVLLFSWRASDEDAADAGVTSHCLQPGHRNMFPPNLVEACFKQFKTQYSTRVVTRTMVRTENGSEPGASMPPPFSVENGTSFLENVTRALGTLQEMLSFEETVPVPGSANGINALGLVVFSVAFGLVIGGMKHKGRVLRDFFDSLNEAIMRLVGIIIWYAPVGILFLIAGKILEMEDMAVLGGQLGMYTLTVIVGLFLHAGIVLPLIYFLVTHRNPFPFIGGMLQALITAMGTSSSSATLPITFRCLEEGLGVDRRITRFVLPVGATVNMDGTALYEALAAIFIAQVNNYELNLGQITTISITATAASVGAAGIPQAGLVTMVIVLTSVGLPTEDITLIIAVDWFLDRLRTMTNVLGDSIGAAVIEHLSQRELELQEAELTLPSLGKPYKSLMAQEKGASRGRGGNESAM

SEQ ID NO: 35809 - protein, 564 aa, Homo sapiens
  REGION 1..564: note = ENSP00000221742
MSSHGNSLFLRESGQRLGRVGWLQRLQESLQQRALRTRLRLQTMTLEHVLRFLRRNAFILLTVSAVVIGVSLAFALRPYQLTYRQIKYFSFPGELLMRMLQMLVLPLIVSSLVTGMASLDNKATGRMGMRAAVYYMVTTIIAVFIGILMVTIIHPGKGSKEGLHREGRIETIPTADAFMDLIRNMFPPNLVEACFKQFKTQYSTRVVTRTMVRTENGSEPGASMPPPFSVENGTSFLENVTRALGTLQEMLSFEETVPVPGSANGINALGLVVFSVAFGLVIGGMKHKGRVLRDFFDSLNEAIMRLVGIIIWYAPVGILFLIAGKILEMEDMAVLGGQLGMYTLTVIVGLFLHAGIVLPLIYFLVTHRNPFPFIGGMLQALITAMGTSSSSATLPITFRCLEEGLGVDRRITRFVLPVGATVNMDGTALYEALAAIFIAQVNNYELNLGQITTISITATAASVGAAGIPQAGLVTMVIVLTSVGLPTEDITLIIAVDWFLDRLRTMTNVLGDSIGAAVIEHLSQRELELQEAELTLPSLGKPYKSLMAQEKGASRGRGGNESAM

SEQ ID NO: 35810 - protein, 486 aa, Homo sapiens
  REGION 1..486: note = ENSP00000471038
MSSHGNSLFLRESGQRLGRVGWLQRLQESLQQRALRTRLRLQTMTLEHVLRFLRRNAFILLTVSAVVIGVSLAFALRPYQLTYRQIKYFSFPGELLMRMLQMLVLPLIVSSLVTGMASLDNKATGRMGMRAAVYYMVTTIIAVFIGILMVTIIHPGKGSKEGLHREGRIETIPTADAFMDLIRNMFPPNLVEACFKQFKTQYSTRVVTRTMVRTENGSEPGASMPPPFSVENGTSFLENVTRALGTLQEMLSFEETVPVPGSANGINALGLVVFSVAFGLVIGGMKHKGRVLRDFFDSLNEAIMRLVGIIICSATLPITFRCLEEGLGVDRRITRFVLPVGATVNMDGTALYEALAAIFIAQVNNYELNLGQITTISITATAASVGAAGIPQAGLVTMVIVLTSVGLPTEDITLIIAVDWFLDRLRTMTNVLGDSIGAAVIEHLSQRELELQEAELTLPSLGKPYKSLMAQEKGASRGRGGNESAM

SEQ ID NO: 35811 - protein, 312 aa, Homo sapiens
  REGION 1..312: note = ENSP00000471781
MSSHGNSLFLRESGQRLGRVGWLQRLQESLQQRALRTRLRLQTMTLEHVLRFLRRNAFILLTVSAVVIGVSLAFALRPYQLTYRQIKYFSFPGELLMRMLQMLVLPLIVSSLVTGMASLDNKATGRMGMRAAVYYMVTTIIAVFIGILMVTIIHPGKGSKEGLHREGRIETIPTADAFMDLIRNMFPPNLVEACFKQFKTQYSTRVVTRTMVRTENGSEPGASMPPPFSVENGTSFLENVTRALGTLQEMLSFEETVPVPGSANGINALGLVVFSVAFGLVIGGMKHKGRVLRDFFDSLNEAIMRLVGIIIW

SEQ ID NO: 35812 - protein, 312 aa, Homo sapiens; identical to SEQ ID NO: 35811
  REGION 1..312: note = ENSP00000446175

SEQ ID NO: 35813 - protein, 160 aa, Homo sapiens
  REGION 1..160: note = ENSP00000471562
MSSHGNSLFLRESGQRLGRVGWLQRLQESLQQRALRTRLRLQTMTLEHVLRFLRRNAFILLTVSAVVIGVSLAFALRPYQLTYRQIKYFSFPGELLMRMLQMLVLPLIVSSLVTGMASLDNKATGRMGMRAAVYYMVTTIIAVFIGILMVTIIHPGKGSK

SEQ ID NO: 35814 - protein, 146 aa, Homo sapiens
  REGION 1..146: note = ENSP00000472837
MSIDHEQPWQQPVPAGERPAAGPGGLAAAAAGKPAAESTAHAPAPADHDPRARAALPAPKRLHSADGQRRGHWGQPGLCPAPISAHLPPDQVLLFSWRASDEDAADAGVTSHCLQPGHRYGIPGQQGHGADGDAGSCVLHGDHHHR

SEQ ID NO: 35815 - protein, 110 aa, Homo sapiens
  REGION 1..110: note = ENSP00000469551
MSSHGNSLFLRESGQRLGRVGWLQRLQESLQQRALRTRLRLQTMTLEHVLRFLRRNAFILLTVSAVVIGVSLAFALRPYQLTYRQIKYFSFPGELLMRMLQMLVLPLIVS

SEQ ID NO: 35816 - protein, 74 aa, Homo sapiens
  REGION 1..74: note = ENSP00000471129
MSSHGNSLFLRESGQRLGRVGWLQRLQESLQQRALRTRLRLQTMTLEHVLRFLRRNAFILLTVSAVVIGELCLL

SEQ ID NO: 35817 - protein, 35 aa, Homo sapiens
  REGION 1..35: note = ENSP00000472133
MSSHGNSLFLRESGQRLGRVGWLQRLQESLQQRAL

SEQ ID NO: 35818 - protein, 679 aa, Homo sapiens
  REGION 1..679: note = ENSP00000272542
MATLITSTTAATAASGPLVDYLWMLILGFIIAFVLAFSVGANDVANSFGTAVGSGVVTLKQACILASIFETVGSVLLGAKVSETIRKGLIDVEMYNSTQGLLMAGSVSAMFGSAVWQLVASFLKLPISGTHCIVGATIGFSLVAKGQEGVKWSELIKIVMSWFVSPLLSGIMSGILFFLVRAFILHKADPVPNGLRALPVFYACTVGINLFSIMYTGAPLLGFDKLPLWGTILISVGCAVFCALIVWFFVCPRMKRKIEREIKCSPSESPLMEKKNSLKEDHEETKLSVGDIENKHPVSEVGPATVPLQAVVEERTVSFKLGDLEEAPERERLPSVDLKEETSIDSTVNGAVQLPNGNLVQFSQAVSNQINSSGHYQYHTVHKDSGLYKELLHKLHLAKVGDCMGDSGDKPLRRNNSYTSYTMAICGMPLDSFRAKEGEQKGEEMEKLTWPNADSKKRIRMDSYTSYCNAVSDLHSASEIDMSVKAEMGLGDRKGSNGSLEEWYDQDKPEVSLLFQFLQILTACFGSFAHGGNDVSNAIGPLVALYLVYDTGDVSSKVATPIWLLLYGGVGICVGLWVWGRRVIQTMGKDLTPITPSSGFSIELASALTVVIASNIGLPISTTHCKVGSVVSVGWLRSKKAVDWRLFRNIFMAWFVTVPISGVISAAIMAIFRYVILRM

SEQ ID NO: 35819 - protein, 89 aa, Homo sapiens
  REGION 1..89: note = ENSP00000392050
  VARIANT 1: note = Any amino acid
XELIKIVMSWFVSPLLSGIMSGILFFLVRAFILHKADPVPNGLRALPVFYACTVGINLFSIMYTGAPWLKSPRRWLACAHFRRLQASVR

SEQ ID NO: 35820 - protein, 213 aa, Homo sapiens
  REGION 1..213: note = ENSP00000390021
  VARIANT 1: note = Any amino acid
XLFFLVRAFILHKADPVPNGLRALPVFYACTVGINLFSIMYTGAPLLGFDKLPLWGTILISVGCAVFCALIVWFFVCPRMKRKIERPATVPLQAVVEERTVSFKLGDLEEAPERERLPSVDLKEETSIDSTVNGAVQLPNGNLVQFSQAVSNQINSSGHYQYHTVHKDSGLYKELLHKLHLAKVGDCMGDSGDKPLRRNNSYTSYTMAICGMP

SEQ ID NO: 35821 - protein, 98 aa, Homo sapiens
  REGION 1..98: note = ENSP00000403763
  VARIANT 1: note = Any amino acid
XFFLVRAFILHKADPVPNGLRALPVFYACTVGINLFSIMYTGAPWLKSPRRWLACAHFRRLQASCWALTNFLCGVPSSSRWDVQFSVPLSSGSLYVPG

SEQ ID NO: 35822 - protein, 115 aa, Homo sapiens
  REGION 1..115: note = ENSP00000413393
RAFILHKADPVPNGLRALPVFYACTVGINLFSIMYTGAPLLGFDKLPLWGTILISVGCAVFCALIVWFFVCPRMKRKIERCGGGENSLIQTWRFGGSSREREASQRGLERGNQHR

SEQ ID NO: 35823 - protein, 547 aa, Homo sapiens
  REGION 1..547: note = ENSP00000358515
MEVEEAFQAVGEMGIYQMYLCFLLAVLLQLYVATEAILIALVGATPSYHWDLAELLPNQSHGNQSAGEDQAFGDWLLTANGSEIHKHVHFSSSFTSIASEWFLIANRSYKVSAASSFFFSGVFVGVISFGQLSDRFGRKKVYLTGFALDILFAIANGFSPSYEFFAVTRFLVGMMNGGMSLVAFVLLNECVGTAYWALAGSIGGLFFAVGIAQYALLGYFIRSWRTLAILVNLQGTVVFLLSLFIPESPRWLYSQGRLSEAEEALYLIAKRNRKLKCTFSLTHPANRSCRETGSFLDLFRYRVLLGHTLILMFIWFVCSLVYYGLTLSAGDLGGSIYANLALSGLIEIPSYPLCIYLINQKWFGRKRTLSAFLCLGGLACLIVMFLPEKKDTGVFAVVNSHSLSLLGKLTISAAFNIVYIYTSELYPTVIRNVGLGTCSMFSRVGGIIAPFIPSLKYVQWSLPFIVFGATGLTSGLLSLLLPETLNSPLLETFSDLQVYSYRRLGEEALSLQALDPQQCVDKESSLGSESEEEEEFYDADEETQMIK

SEQ ID NO: 35824 - protein, 245 aa, Homo sapiens
  REGION 1..245: note = ENSP00000358514
MEVEEAFQAVGEMGIYQMYLCFLLAVLLQLYVATEAILIALVGATPSYHWDLAELLPNQSHGNQSAGEDQAFGDWLLTANGSEIHKHVHFSSSFTSIASEWFLIANRSYKVSAASSFFFSGVFVGVISFGQLSDRFGRKKVYLTGFALDILFAIANGFSPSYEFFAVTRFLVGMMNGGMSLVAFVLLNECVGTAYWALAGSIGGLFFAVGIAQYALLGYFIRSWRTLAILVNLQGTVVFLLSLVD

SEQ ID NO: 35825 - protein, 694 aa, Homo sapiens
  REGION 1..694: note = ENSP00000410245
MAIDRRREAAGGGPGRQPAPAEENGSLPPGDAAASAPLGGRAGPGGGAEIQPLPPLHPGGGPHPSCCSAAAAPSLLLLDYDGSVLPFLGGLGGGYQKTLVLLTWIPALFIGFSQFSDSFLLDQPNFWCRGAGKGTELAGVTTTGRGGDMGNWTSLPTTPFATAPWEAAGNRSNSSGADGGDTPPLPSPPDKGDNASNCDCRAWDYGIRAGLVQNVVSKWDLVCDNAWKVHIAKFSLLVGLIFGYLITGCIADWVGRRPVLLFSIIFILIFGLTVALSVNVTMFSTLRFFEGFCLAGIILTLYALRIELCPPGKRFMITMVASFVAMAGQFLMPGLAALCRDWQVLQALIICPFLLMLLYWSIFPESLRWLMATQQFESAKRLILHFTQKNRMNPEGDIKGVIPELEKELSRRPKKVCIVKVVGTRNLWKNIVVLCVNSLTGYGIHHCFARSMMGHEVKVPLLENFYADYYTTASIALVSCLAMCVVVRFLGRRGGLLLFMILTALASLLQLGLLNLIGKYSQHPDSELQLKLAVGMSDSVKDKFSIAFSIVGMFASHAVGSLSVFFCAEITPTVIRCGGLGLVLASAGFGMLTAPIIELHNQKGYFLHHIIFACCTLICIICILLLPESRDQNLPENISNGEHYTRQPLLPHKKGEQPLLLTNAELKDYSGLHDAAAAGDTLPEGATANGMKAM

SEQ ID NO: 35826 - protein, 686 aa, Homo sapiens
  REGION 1..686: note = ENSP00000385028
MAIDRRREAAGGGPGRQPAPAEENGSLPPGDAAASAPLGGRAGPGGGAEIQPLPPLHPGGGPHPSCCSAAAAPSLLLLDYDGSVLPFLGGLGGGYQKTLVLLTWIPALFIGFSQFSDSFLLDQPNFWCRGAGKGTELAGVTTTGRGGDMGNWTSLPTTPFATAPWEAAGNRSNSSGADGGDTPPLPSPPDKGDNASNCDCRAWDYGIRAGLVQNVVSKWDLVCDNAWKVHIAKFSLLVGLIFGYLITGCIADWVGRRPVLLFSIIFILIFGLTVALSVNVTMFSTLRFFEGFCLAGIILTLYALRIELCPPGKRFMITMVASFVAMAGQFLMPGLAALCRDWQVLQALIICPFLLMLLYWSIFPESLRWLMATQQFESAKRLILHFTQKNRMNPEGDIKGVIPELEKELSRRPKKVCIVKVVGTRNLWKNIVVLCVNSLTGYGIHHCFARSMMGHEVKVPLLENFYADYYTTASIALVSCLAMCVVVRFLGRRGGLLLFMILTALASLLQLGLLNLIGKYSQHPDSGMSDSVKDKFSIAFSIVGMFASHAVGSLSVFFCAEITPTVIRCGGLGLVLASAGFGMLTAPIIELHNQKGYFLHHIIFACCTLICIICILLLPESRDQNLPENISNGEHYTRQPLLPHKKGEQPLLLTNAELKDYSGLHDAAAAGDTLPEGATANGMKAM

SEQ ID NO: 35827 - protein, 92 aa, Homo sapiens
  REGION 1..92: note = ENSP00000417737
MFSTLRFFEGFCLAGIILTLYALRIELCPPGKRFMITMVASFVAMAGQFLMPGLAALCRDWQVLQALIICPFLLMLLYWSYYLWLLSGYSQS

SEQ ID NO: 35828 - protein, 405 aa, Homo sapiens
  REGION 1..405: note = ENSP00000369657
MFSTLRFFEGFCLAGIILTLYALRIELCPPGKRFMITMVASFVAMAGQFLMPGLAALCRDWQVLQALIICPFLLMLLYWSIFPESLRWLMATQQFESAKRLILHFTQKNRMNPEGDIKGVIPELEKELSRRPKKVCIVKVVGTRNLWKNIVVLCVNSLTGYGIHHCFARSMMGHEVKVPLLENFYADYYTTASIALVSCLAMCVVVRFLGRRGGLLLFMILTALASLLQLGLLNLIGKYSQHPDSGMSDSVKDKFSIAFSIVGMFASHAVGSLSVFFCAEITPTVIRCGGLGLVLASAGFGMLTAPIIELHNQKGYFLHHIIFACCTLICIICILLLPESRDQNLPENISNGEHYTRQPLLPHKKGEQPLLLTNAELKDYSGLHDAAAAGDTLPEGATANGMKAM

SEQ ID NO: 35829 - protein, 405 aa, Homo sapiens; identical to SEQ ID NO: 35828
  REGION 1..405: note = ENSP00000419463

SEQ ID NO: 35830 - protein, 440 aa, Homo sapiens
  REGION 1..440: note = ENSP00000418134
NSSGADGGDTPPLPSPPDKGDNASNCDCRAWDYGIRAGLVQNVVSKWDLVCDNAWKVHIAKFSLLVGLIFGYLITGCIADWVGRRPVLLFSIIFILIFGLTVALSVNVTMFSTLRFFEGFCLAGIILTLYALRIELCPPGKRFMITMVASFVAMAGQFLMPGLAALCRDWQVLQALIICPFLLMLLYWSIFPESLRWLMATQQFESAKRLILHFTQKNRMNPEGDIKGVIPELEKELSRRPKKVCIVKVVGTRNLWKNIVVLCVNSLTGYGIHHCFARSMMGHEVKVPLLENFYADYYTTASIALVSCLAMCVVVRFLGRRGGLLLFMILTALASLLQLGLLNLIGKYSQHPDSGMSDSVKDKFSIAFSIVGMFASHAVGSLSVFFCAEITPTVIRCVMGDTPGDAGFSEIKDESLAPGWCGINQRQLCLWLWTHQLRGS

SEQ ID NO: 35831 - protein, 386 aa, Homo sapiens
  REGION 1..386: note = ENSP00000418985
MPVGPQHPSFKRSSLDTFHGCCQQQETGALPWDTDTKRWRPELNWDLVCDNAWKVHIAKFSLLVGLIFGYLITGCIADWVGRRPVLLFSIIFILIFGLTVALSVNVTMFSTLRFFEGFCLAGIILTLYALRIELCPPGKRFMITMVASFVAMAGQFLMPGLAALCRDWQVLQALIICPFLLMLLYWSIFPESLRWLMATQQFESAKRLILHFTQKNRMNPEGDIKGVIPELEKELSRRPKKVCIVKVVGTRNLWKNIVVLCVNSLTGYGIHHCFARSMMGHEVKVPLLENFYADYYTTASIALVSCLAMCVVVRFLGRRGGLLLFMILTALASLLQLGLLNLIGKYSQHPDSGMSDSVKDKFSIAFSIVGMFASHAVGSLSVFFCA

SEQ ID NO: 35832 - protein, 361 aa, Homo sapiens
  REGION 1..361: note = ENSP00000369653
MAIDRRREAAGGGPGRQPAPAEENGSLPPGDAAASAPLGGRAGPGGGAEIQPLPPLHPGGGPHPSCCSAAAAPSLLLLDYDGSVLPFLGGLGGGYQKTLVLLTWIPALFIGFSQFSDSFLLDQPNFWCRGAGKGTELAGVTTTGRGGDMGNWTSLPTTPFATAPWEAAGNRSNSSGADGGDTPPLPSPPDKGDNASNCDCRAWDYGIRAGLVQNVVSKWDLVCDNAWKVHIAKFSLLVGLIFGYLITGCIADWVGRRPVLLFSIIFILIFGLTVALSVNVTMFSTLRFFEGFCLAGIILTLYALRIELCPPGKRFMITMVASFVAMAGQFLMPGLAALCRDWQVLQALIICPFLLMLLYWS

SEQ ID NO: 35833 - protein, 551 aa, Homo sapiens
  REGION 1..551: note = ENSP00000200652
MRDYDEVIAFLGEWGPFQRLIFFLLSASIIPNGFNGMSVVFLAGTPEHRCRVPDAANLSSAWRNNSVPLRLRDGREVPHSCSRYRLATIANFSALGLEPGRDVDLGQLEQESCLDGWEFSQDVYLSTVVTEWNLVCEDNWKVPLTTSLFFVGVLLGSFVSGQLSDRFGRKNVLFATMAVQTGFSFLQIFSISWEMFTVLFVIVGMGQISNYVVAFILGTEILGKSVRIIFSTLGVCTFFAVGYMLLPLFAYFIRDWRMLLLALTVPGVLCVPLWWFIPESPRWLISQRRFREAEDIIQKAAKMNNIAVPAVIFDSVEELNPLKQQKAFILDLFRTRNIAIMTIMSLLLWMLTSVGYFALSLDAPNLHGDAYLNCFLSALIEIPAYITAWLLLRTLPRRYIIAAVLFWGGGVLLFIQLVPVDYYFLSIGLVMLGKFGITSAFSMLYVFTAELYPTLVRNMAVGVTSTASRVGSIIAPYFVYLGAYNRMLPYIVMGSLTVLIGILTLFFPESLGMTLPETLEQMQKVKWFRSGKKTRDSMETEENPKVLITAF

SEQ ID NO: 35834 - protein, 261 aa, Homo sapiens
  REGION 1..261: note = ENSP00000445946
MAFNDLLQQVGGVGRFQQIQVTLVVLPLLLMASHNTLQNFTAAIPTHHCRPPADANLSKNGGLEVWLPRDRQGQPESCLRFTSPQWGLPFLNGTEANGTGATEPCTDGWIYDNSTFPSTIVTEGPTPAGPVLVHGGGAARSHGVRLPCRQARPPEGTHLELPADSCVRDLRSLRTQLPHLLRLPAPLGHGSGWHLPQLHDTECGVDAHSHTGLRGHLDWLCLQPGPVPPGWCGLRCAPLAPPAATGLCAFFCLLHLLLVLH

SEQ ID NO: 35835 - protein, 550 aa, Homo sapiens
  REGION 1..550: note = ENSP00000353597
MAFNDLLQQVGGVGRFQQIQVTLVVLPLLLMASHNTLQNFTAAIPTHHCRPPADANLSKNGGLEVWLPRDRQGQPESCLRFTSPQWGLPFLNGTEANGTGATEPCTDGWIYDNSTFPSTIVTEWDLVCSHRALRQLAQSLYMVGVLLGAMVFGYLADRLGRRKVLILNYLQTAVSGTCAAFAPNFPIYCAFRLLSGMALAGISLNCMTLNVEWMPIHTRACVGTLIGYVYSLGQFLLAGVAYAVPHWRHLQLLVSAPFFAFFIYSWFFIESARWHSSSGRLDLTLRALQRVARINGKREEGAKLSMEVLRASLQKELTMGKGQASAMELLRCPTLRHLFLCLSMLWFATSFAYYGLVMDLQGFGVSIYLIQVIFGAVDLPAKLVGFLVINSLGRRPAQMAALLLAGICILLNGVIPQDQSIVRTSLAVLGKGCLAASFNCIFLYTGELYPTMIRQTGMGMGSTMARVGSIVSPLVSMTAELYPSMPLFIYGAVPVAASAVTVLLPETLGQPLPDTVQDLESRKGKQTRQQQEHQKYMVPLQASAQEKNGL

SEQ ID NO: 35836 - protein, 563 aa, Homo sapiens
  REGION 1..563: note = ENSP00000367102
MAFNDLLQQVGGVGRFQQIQVTLVVLPLLLMASHNTLQNFTAAIPTHHCRPPADANLSKNGGLEVWLPRDRQGQPESCLRFTSPQWGLPFLNGTEANGTGATEPCTDGWIYDNSTFPSTIVTEWDLVCSHRALRQLAQSLYMVGVLLGAMVFGYLADRLGRRKVLILNYLQTAVSGTCAAFAPNFPIYCAFRLLSGMALAGISLNCMTLNVEWMPIHTRACVGTLIGYVYSLGQFLLAGVAYAVPHWRHLQLLVSAPFFAFFIYSWFFIESARWHSSSGRLDLTLRALQRVARINGKREEGAKLSMEVLRASLQKELTMGKGQASAMELLRCPTLRHLFLCLSMLWFATSFAYYGLVMDLQGFGVSIYLIQVIFGAVDLPAKLVGFLVINSLGRRPAQMAALLLAGICILLNGVIPQDQSIVRTSLAVLGKGCLAASFNCIFLYTGELYPTMIRQTGMGMGSTMARVGSIVSPLVSMTAELYPSMPLFIYGAVPVAASAVTVLLPETLGQPLPDTVQDLESRWAPTQKEAGIYPRKGKQTRQQQEHQKYMVPLQASAQEKNGL

SEQ ID NO: 35837 - protein, 506 aa, Homo sapiens
  REGION 1..506: note = ENSP00000396401
MAFNDLLQQVGGVGRFQQIQVTLVVLPLLLMASHNTLQNFTAAIPTHHCRPPADANLSKNGGLEVWLPRDRQGQPESCLRFTSPQWGLPFLNGTEANGTGATEPCTDGWIYDNSTFPSTIVTEWDLVCSHRALRQLAQSLYMVGVLLGAMVFGYLADRLGRRKVLILNYLQTAVSGTCAAFAPNFPIYCAFRLLSGMALAGISLNCMTLNVEWMPIHTRACVGTLIGYVYSLGQFLLAGVAYAVPHWRHLQLLVSAPFFAFFIYSWFFIESARWHSSSGRLDLTLRALQRVARINGKREEGAKLSMEVLRASLQKELTMGKGQASAMELLRCPTLRHLFLCLSMLWFATSFAYYGLVMDLQGFGVSIYLIQVIFGAVDLPAKLVGFLVINSLGRRPAQMAALLLAGICILLNGVIPQDQSIVRTSLAVLGKGCLAASFNCIFLYTGELYPTMIRAVTVLLPETLGQPLPDTVQDLESRKGKQTRQQQEHQKYMVPLQASAQEKNGL

SEQ ID NO: 35838 - protein, 519 aa, Homo sapiens
  REGION 1..519: note = ENSP00000404441
MAFNDLLQQVGGVGRFQQIQVTLVVLPLLLMASHNTLQNFTAAIPTHHCRPPADANLSKNGGLEVWLPRDRQGQPESCLRFTSPQWGLPFLNGTEANGTGATEPCTDGWIYDNSTFPSTIVTEWDLVCSHRALRQLAQSLYMVGVLLGAMVFGYLADRLGRRKVLILNYLQTAVSGTCAAFAPNFPIYCAFRLLSGMALAGISLNCMTLNVEWMPIHTRACVGTLIGYVYSLGQFLLAGVAYAVPHWRHLQLLVSAPFFAFFIYSWFFIESARWHSSSGRLDLTLRALQRVARINGKREEGAKLSMEVLRASLQKELTMGKGQASAMELLRCPTLRHLFLCLSMLWFATSFAYYGLVMDLQGFGVSIYLIQVIFGAVDLPAKLVGFLVINSLGRRPAQMAALLLAGICILLNGVIPQDQSIVRTSLAVLGKGCLAASFNCIFLYTGELYPTMIRAVTVLLPETLGQPLPDTVQDLESRWAPTQKEAGIYPRKGKQTRQQQEHQKYMVPLQASAQEKNGL

SEQ ID NO: 35839 - protein, 542 aa, Homo sapiens
  REGION 1..542: note = ENSP00000337335
MTFSEILDRVGSMGHFQFLHVAILGLPILNMANHNLLQIFTAATPVHHCRPPHNASTGPWVLPMGPNGKPERCLRFVHPPNASLPNDTQRAMEPCLDGWVYNSTKDSIVTEWDLVCNSNKLKEMAQSIFMAGILIGGLVLGDLSDRFGRRPILTCSYLLLAASGSGAAFSPTFPIYMVFRFLCGFGISGITLSTVILNVEWVPTRMRAIMSTALGYCYTFGQFILPGLAYAIPQWRWLQLTVSIPFFVFFLSSWWTPESIRWLVLSGKSSKALKILRRVAVFNGKKEEGERLSLEELKLNLQKEISLAKAKYTASDLFRIPMLRRMTFCLSLAWFATGFAYYSLAMGVEEFGVNLYILQIIFGGVDVPAKFITILSLSYLGRHTTQAAALLLAGGAILALTFVPLDLQTVRTVLAVFGKGCLSSSFSCLFLYTSELYPTVIRQTGMGVSNLWTRVGSMVSPLVKITGEVQPFIPNIIYGITALLGGSAALFLPETLNQPLPETIEDLENWSLRAKKPKQEPEVEKASQRIPLQPHGPGLGSS

SEQ ID NO: 35840 - protein, 451 aa, Homo sapiens
  REGION 1..451: note = ENSP00000441658
MEPCLDGWVYNSTKDSIVTEWDLVCNSNKLKEMAQSIFMAGILIGGLVLGDLSDRFGRRPILTCSYLLLAASGSGAAFSPTFPIYMVFRFLCGFGISGITLSTVILNVEWVPTRMRAIMSTALGYCYTFGQFILPGLAYAIPQWRWLQLTVSIPFFVFFLSSWWTPESIRWLVLSGKSSKALKILRRVAVFNGKKEEGERLSLEELKLNLQKEISLAKAKYTASDLFRIPMLRRMTFCLSLAWFATGFAYYSLAMGVEEFGVNLYILQIIFGGVDVPAKFITILSLSYLGRHTTQAAALLLAGGAILALTFVPLDLQTVRTVLAVFGKGCLSSSFSCLFLYTSELYPTVIRQTGMGVSNLWTRVGSMVSPLVKITGEVQPFIPNIIYGITALLGGSAALFLPETLNQPLPETIEDLENWSLRAKKPKQEPEVEKASQRIPLQPHGPGLGSS

SEQ ID NO: 35841 - protein, 419 aa, Homo sapiens
  REGION 1..419: note = ENSP00000443368
MAQSIFMAGILIGGLVLGDLSDRFGRRPILTCSYLLLAASGSGAAFSPTFPIYMVFRFLCGFGISGITLSTVILNVEWVPTRMRAIMSTALGYCYTFGQFILPGLAYAIPQWRWLQLTVSIPFFVFFLSSWWTPESIRWLVLSGKSSKALKILRRVAVFNGKKEEGERLSLEELKLNLQKEISLAKAKYTASDLFRIPMLRRMTFCLSLAWFATGFAYYSLAMGVEEFGVNLYILQIIFGGVDVPAKFITILSLSYLGRHTTQAAALLLAGGAILALTFVPLDLQTVRTVLAVFGKGCLSSSFSCLFLYTSELYPTVIRQTGMGVSNLWTRVGSMVSPLVKITGEVQPFIPNIIYGITALLGGSAALFLPETLNQPLPETIEDLENWSLRAKKPKQEPEVEKASQRIPLQPHGPGLGSS

SEQ ID NO: 35842 - protein, 533 aa, Homo sapiens
  REGION 1..533: note = ENSP00000311463
MTFSEILDRVGSMGHFQFLHVAILGLPILNMANHNLLQIFTAATPVHHCRPPHNASTGPWVLPMGPNGKPERCLRFVHPPNASLPNDTQRAMEPCLDGWVYNSTKDSIVTEWDLVCNSNKLKEMAQSIFMAGILIGGLVLGDLSDRFGRRPILTCSYLLLAASGSGAAFSPTFPIYMVFRFLCGFGISGITLSTVILNVEWVPTRMRAIMSTALGYCYTFGQFILPGLAYAIPQWRWLQLTVSIPFFVFFLSSWWTPESIRWLVLSGKSSKALKILRRVAVFNGKKEEGERLSLEELKLNLQKEISLAKAKYTASDLFRIPMLRRMTFCLSLAWFATGFAYYSLAMGVEEFGVNLYILQIIFGGVDVPAKFITILSLSYLGRHTTQAAALLLAGGAILALTFVPLDLQTVRTVLAVFGKGCLSSSFSCLFLYTSELYPTVIRQTGMGVSNLWTRVGSMVSPLVKITGEVQPFIPNIIYGITALLGGSAALFLPETLNQPLPETIEDLENWSVTASGPISAPPWGSRSGPRAFP

SEQ ID NO: 35843 - protein, 542 aa, Homo sapiens; identical to SEQ ID NO: 35839
  REGION 1..542: note = ENSP00000398548

SEQ ID NO: 35844 - protein, 644 aa, Homo sapiens
  REGION 1..644: note = ENSP00000333519
MRPSGDEDRARRRRRRRRRRDLLLSQLCFLASVALLLWSLSSLREQKELDLMDLVGEDRKWMMARKLMQVNDTLTSEDAGLRNSKNCTEPALHEFPNDIFTNEDRRQGAVVLHVLCAIYMFYALAIVCDDFFVPSLEKICERLHLSEDVAGATFMAAGSSAPELFTSVIGVFITKGDVGVGTIVGSAVFNILCIIGVCGLFAGQVVALSSWCLLRDSIYYTLSVIALIVFIYDEKVSWWESLVLVLMYLIYIVIMKYNACIHQCFERRTKGAGNMVNGLANNAEIDDSSNCDATVVLLKKANFHRKASVIMVDELLSAYPHQLSFSEAGLRIMITSHFPPKTRLSMASRMLINERQRLINSRAYTNGESEVAIKIPIKHTVENGTGPSSAPDRGVNGTRRDDVVAEAGNETENENEDNENDEEEEEDEDDDEGPYTPFDTPSGKLETVKWAFTWPLSFVLYFTVPNCNKPRWEKWFMVTFASSTLWIAAFSYMMVWMVTIIGYTLGIPDVIMGITFLAAGTSVPDCMASLIVARQGMGDMAVSNSIGSNVFDILIGLGLPWALQTLAVDYGSYIRLNSRGLIYSVGLLLASVFVTVFGVHLNKWQLDKKLGCGCLLLYGVFLCFSIMTEFNVFTFVNLPMCGDH

SEQ ID NO: 35845 - protein, 644 aa, Homo sapiens; identical to SEQ ID NO: 35844
  REGION 1..644: note = ENSP00000482967

SEQ ID NO: 35846 - protein, 558 aa, Homo sapiens
  REGION 1..558: note = ENSP00000376948
MAPVNGTQTAKNCTDPAIHEFPTDLFSNKERQHGAVLLHILGALYMFYALAIVCDDFFVPSLEKICERLHLSEDVAGATFMAAGSSTPELFASVIGVFITHGDVGVGTIVGSAVFNILCIIGVCGLFAGQVVRLTWWAVCRDSVYYTISVIVLIVFIYDEQIVWWEGLVLIILYVFYILIMKYNVKMQAFFTVKQKSIANGNPVNSELEAGNDFYDGSYDDPSVPLLGQVKEKPQYGKNPVVMVDEIMSSSPPKFTFPEAGLRIMITNKFGPRTRLRMASRIIINERQRLINSANGVSSKPLQNGRHENIENGNVPVENPEDPQQNQEQQPPPQPPPPEPEPVEADFLSPFSVPEARGDKVKWVFTWPLIFLLCVTIPNCSKPRWEKFFMVTFITATLWIAVFSYIMVWLVTIIGYTLGIPDVIMGITFLAAGTSVPDCMASLIVARQGLGDMAVSNTIGSNVFDILVGLGVPWGLQTMVVNYGSTVKINSRGLVYSVVLLLGSVALTVLGIHLNKWRLDRKLGVYVLVLYAIFLCFSIMIEFNVFTFVNLPMCREDD

SEQ ID NO: 35847 - protein, 603 aa, Homo sapiens
  REGION 1..603: note = ENSP00000433302
MALRGTLRPLKVRRRREMLPQQVGFVCAVLALVCCASGLFGSLGHKTASASKRVLPDTWRNRKLMAPVNGTQTAKNCTDPAIHEFPTDLFSNKERQHGAVLLHILGALYMFYALAIVCDDFFVPSLEKICERLHLSEDVAGATFMAAGSSTPELFASVIGVFITHGDVGVGTIVGSAVFNILCIIGVCGLFAGQVVRLTWWAVCRDSVYYTISVIVLIVFIYDEQIVWWEGLVLIILYVFYILIMKYNVKMQAFFTVKQKSIANGNPVNSELEAVKEKPQYGKNPVVMVDEIMSSSPPKFTFPEAGLRIMITNKFGPRTRLRMASRIIINERQRLINSANGVSSKPLQNGRHENIENGNVPVENPEDPQQNQEQQPPPQPPPPEPEPVEADFLSPFSVPEARGDKVKWVFTWPLIFLLCVTIPNCSKPRWEKFFMVTFITATLWIAVFSYIMVWLVTIIGYTLGIPDVIMGITFLAAGTSVPDCMASLIVARQGLGDMAVSNTIGSNVFDILVGLGVPWGLQTMVVNYGSTVKINSRGLVYSVVLLLGSVALTVLGIHLNKWRLDRKLGVYVLVLYAIFLCFSIMIEFNVFTFVNLPMCREDD

SEQ ID NO: 35848 - protein, 622 aa, Homo sapiens
  REGION 1..622: note = ENSP00000431840
MALRGTLRPLKVRRRREMLPQQVGFVCAVLALVCCASGLFGSLGHKTASASKRVLPDTWRNRKLMAPVNGTQTAKNCTDPAIHEFPTDLFSNKERQHGAVLLHILGALYMFYALAIVCDDFFVPSLEKICERLHLSEDVAGATFMAAGSSTPELFASVIGVFITHGDVGVGTIVGSAVFNILCIIGVCGLFAGQVVRLTWWAVCRDSVYYTISVIVLIVFIYDEQIVWWEGLVLIILYVFYILIMKYNVKMQAFFTVKQKSIANGNPVNSELEAGNDFYDGSYDDPSVPLLGQVKEKPQYGKNPVVMVDEIMSSSPPKFTFPEAGLRIMITNKFGPRTRLRMASRIIINERQRLINSANGVSSKPLQNGRHENIENGNVPVENPEDPQQNQEQQPPPQPPPPEPEPVEADFLSPFSVPEARGDKVKWVFTWPLIFLLCVTIPNCSKPRWEKFFMVTFITATLWIAVFSYIMVWLVTIIGYTLGIPDVIMGITFLAAGTSVPDCMASLIVARQGLGDMAVSNTIGSNVFDILVGLGVPWGLQTMVVNYGSTVKINSRGLVYSVVLLLGSVALTVLGIHLNKWRLDRKLGVYVLVLYAIFLCFSIMIEFNVFTFVNLPMCREDD

SEQ ID NO: 35849 - protein, 64 aa, Homo sapiens
  REGION 1..64: note = ENSP00000452099
MFYALAIVCDDFFVPSLEKICERLHLSEDVAGATFMAAGSSTPELFASVIGVFITHGDVGVGTI

SEQ ID NO: 35850 - protein, 464 aa, Homo sapiens
  REGION 1..464: note = ENSP00000432464
  VARIANT 1: note = Any amino acid
XVCDDFFVPSLEKICERLHLSEDVAGATFMAAGSSTPELFASVIGVFITHGDVGVGTIVGSAVFNILCIIGVCGLFAGQVVRLTWWAVCRDSVYYTISVIVLIVFIYDEQIVWWEGLVLIILYVFYILIMKYNVKMQAFFTVKQKSIANGNPVNSELEAVKEKPQYGKNPVVMVDEIMSSSPPKFTFPEAGLRIMITNKFGPRTRLRMASRIIINERQRLINSANGVSSKPLQNGRHENIENGNVPVENPEDPQQNQEQQPPPQPPPPEPEPVEADFLSPFSVPEARGDKVKWVFTWPLIFLLCVTIPNCSKPRWEKFFMVTFITATLWIAVFSYIMVWLVTIIGYTLGIPDVIMGITFLAAGTSVPDCMASLIVARQGLGDMAVSNTIGSNVFDILVGLGVPWGLQTMVVNYGSTVKINSRGLVYSVVLLLGSVALTCSSEVPGIQPQEALIEGQGGRQWKER

SEQ ID NO: 35851 - protein, 315 aa, Homo sapiens
  REGION 1..315: note = ENSP00000329033
MTHQDLSITAKLINGGVAGLVGVTCVFPIDLAKTRLQNQHGKAMYKGMIDCLMKTARAEGFFGMYRGAAVNLTLVTPEKAIKLAANDFFRRLLMEDGMQRNLKMEMLAGCGAGMCQVVVTCPMEMLKIQLQDAGRLAVHHQGSASAPSTSRSYTTGSASTHRRPSATLIAWELLRTQGLAGLYRGLGATLLRDIPFSIIYFPLFANLNNLGFNELAGKASFAHSFVSGCVAGSIAAVAVTPLDVLKTRIQTLKKGLGEDMYSGITDCARKLWIQEGPSAFMKGAGCRALVIAPLFGIAQGVYFIGIGERILKCFD

SEQ ID NO: 35852 - protein, 315 aa, Homo sapiens; identical to SEQ ID NO: 35851
  REGION 1..315: note = ENSP00000382710

SEQ ID NO: 35853 - protein, 303 aa, Homo sapiens
  REGION 1..303: note = ENSP00000352167
MALDFLAGCAGGVAGVLVGHPFDTVKVRLQVQSVEKPQYRGTLHCFKSIIKQESVLGLYKGLGSPLMGLTFINALVFGVQGNTLRALGHDSPLNQFLAGAAAGAIQCVICCPMELAKTRLQLQDAGPARTYKGSLDCLAQIYGHEGLRGVNRGMVSTLLRETPSFGVYFLTYDALTRALGCEPGDRLLVPKLLLAGGTSGIVSWLSTYPVDVVKSRLQADGLRGAPRYRGILDCVHQSYRAEGWRVFTRGLASTLLRAFPVNAATFATVTVVLTYARGEEAGPEGEAVPAAPAGPALAQPSSL

SEQ ID NO: 35854 - protein, 237 aa, Homo sapiens
  REGION 1..237: note = ENSP00000450913
MGLTFINALVFGVQGNTLRALGHDSPLNQFLAGAAAGAIQCVICCPMELAKTRLQLQDAGPARTYKGSLDCLAQIYGHEGLRGVNRGMVSTLLRETPSFGVYFLTYDALTRALGCEPGDRLLVPKLLLAGGTSGIVSWLSTYPVDVVKSRLQADGLRGAPRYRGILDCVHQSYRAEGWRVFTRGLASTLLRAFPVNAATFATVTVVLTYARGEEAGPEGEAVPAAPAGPALAQPSSL

SEQ ID NO: 35855 - protein, 145 aa, Homo sapiens
  REGION 1..145: note = ENSP00000376640
MALDFLAGCAGGTASGPERGEASVPRDVALLQVHHQARERAGPVQGPGLAAHGAHLHQRAGVRGAGQHPPGPGPRLAPQPVPGRCGGGRHPVRHLLPHGAGQDAAAAAGRGPSAHLQGLAGLPRADLRARGSAWRQPGHGVHVAA

SEQ ID NO: 35856 - protein, 237 aa, Homo sapiens; identical to SEQ ID NO: 35854
  REGION 1..237: note = ENSP00000452446

SEQ ID NO: 35857 - protein, 237 aa, Homo sapiens; identical to SEQ ID NO: 35854
  REGION 1..237: note = ENSP00000452078

SEQ ID NO: 35858 - protein, 35 aa, Homo sapiens
  REGION 1..35: note = ENSP00000451573
MALDFLAGCAGGVAGVLVGHPFDTVKGLSPSIAKV

SEQ ID NO: 35859 - protein, 35 aa, Homo sapiens; identical to SEQ ID NO: 35858
  REGION 1..35: note = ENSP00000451952

SEQ ID NO: 35860 - protein, 129 aa, Homo sapiens
  REGION 1..129: note = ENSP00000452324
MGLTFINALVFGVQGNTLRALGHDSPLNQFLAGAAAGAIQCVICCPMELAKTRLQLQDAGPARTYKGSLDCLAQIYGHEGLRGVNRGMVSTLLRETPSFGVYFLTYDALTRALGCEPGDRLLVPKLLLA

SEQ ID NO: 35861 - protein, 138 aa, Homo sapiens
  REGION 1..138: note = ENSP00000451644
MALDFLAGCAGGTASGPERGEASVPRDVALLQVHHQARERAGPVQGPGLAAHGAHLHQRAGVRGAGQHPPGPGPRLAPQPVPGRCGGGRHPVRHLLPHGAGQDAAAAAGRGPSAHLQGLAGLPRADLRARGSAWRQPG

SEQ ID NO: 35862 - protein, 122 aa, Homo sapiens
  REGION 1..122: note = ENSP00000451808
MALDFLAGCAGGVAGVLVGHPFDTVKALGTERIQDLDLLYSAQNHSHRPEAHGLHTFLHEGSFLSCFLGHSNNQGAVVLTYDEGVTGHPWAWDGECGWGLAVGAPRLDVMLKFCVALTAFTF

SEQ ID NO: 35863 - protein, 361 aa, Homo sapiens
  REGION 1..361: note = ENSP00000383898
MFSSVAHLARANPFNTPHLQLVHDGLGDLRSSSPGPTGQPRRPRNLAAAAVEEYSCEFGSAKYYALCGFGGVLSCGLTHTAVVPLDLVKCRMQVDPQKYKGIFNGFSVTLKEDGVRGLAKGWAPTFLGYSMQGLCKFGFYEVFKVLYSNMLGEENTYLWRTSLYLAASASAEFFADIALAPMEAAKVRIQTQPGYANTLRDAAPKMYKEEGLKAFYKGVAPLWMRQIPYTMMKFACFERTVEALYKFVVPKPRSECSKPEQLVVTFVAGYIAGVFCAIVSHPADSVVSVLNKEKGSSASLVLKRLGFKGVWKGLFARIIMIGTLTALQWFIYDSVKVYFRLPRPPPPEMPESLKKKLGLTQ

SEQ ID NO: 35864 - protein, 361 aa, Homo sapiens; identical to SEQ ID NO: 35863
  REGION 1..361: note = ENSP00000188376

SEQ ID NO: 35865 - protein, 362 aa, Homo sapiens
  REGION 1..362: note = ENSP00000447310
MFSSVAHLARANPFNTPHLQLVHDGLGDLRSSSPGPTGQPRRPRNLAAAAVEEQYSCDYGSGRFFILCGLGGIISCGTTHTALVPLDLVKCRMQVDPQKYKGIFNGFSVTLKEDGVRGLAKGWAPTFLGYSMQGLCKFGFYEVFKVLYSNMLGEENTYLWRTSLYLAASASAEFFADIALAPMEAAKVRIQTQPGYANTLRDAAPKMYKEEGLKAFYKGVAPLWMRQIPYTMMKFACFERTVEALYKFVVPKPRSECSKPEQLVVTFVAGYIAGVFCAIVSHPADSVVSVLNKEKGSSASLVLKRLGFKGVWKGLFARIIMIGTLTALQWFIYDSVKVYFRLPRPPPPEMPESLKKKLGLTQ

SEQ ID NO: 35866 - protein, 153 aa, Homo sapiens
  REGION 1..153: note = ENSP00000447339
MFSSVAHLARANPFNTPHLQLVHDGLGDLRSSSPGPTGQPRRPRNLAAAAVEEQYSCDYGSGRFFILCGLGGIISCGTTHTALVPLDLVKCRMQVDPQKYKGIFNGFSVTLKEDGVRGLAKGWAPTFLGYSMQGLCKFGFYEVFKVLYSNMLG

SEQ ID NO: 35867 - protein, 361 aa, Homo sapiens; identical to SEQ ID NO: 35863
  REGION 1..361: note = ENSP00000448708

SEQ ID NO: 35868 - protein, 122 aa, Homo sapiens
  REGION 1..122: note = ENSP00000448969
MFSSVAHLARANPFNTPHLQLVHDGLGDLRSSSPGPTGQPRRPRNLAAAAVEGEIRPCPIQSCGLLVGRPAFEAWTRLGGQGRTSPARCTVGRRPVACPGVSAFSTIGGCQILGLPSRAWKR

SEQ ID NO: 35869 - protein, 154 aa, Homo sapiens
  REGION 1..154: note = ENSP00000449479
MFSSVAHLARANPFNTPHLQLVHDGLGDLRSSSPGPTGQPRRPRNLAAAAVEEQYSCDYGSGRFFILCGLGGIISCGTTHTALVPLDLVKCRMQVDPQKYKGIFNGFSVTLKEDGVRGLAKGWAPTFLGYSMQGLCKFGFYEVFKVLYSNMLGE

SEQ ID NO: 35870 - protein, 156 aa, Homo sapiens
  REGION 1..156: note = ENSP00000449793
MFSSVAHLARANPFNTPHLQLVHDGLGDLRSSSPGPTGQPRRPRNLAAAAVEEYSCEFGSAKYYALCGFGGVLSCGLTHTAVVPLDLVKCRMQVDPQKYKGIFNGFSVTLKEDGVRGLAKGWAPTFLGYSMQGLCKFGFYEVFKVLYSNMLGEVCN

SEQ ID NO: 35871 - protein, 361 aa, Homo sapiens; identical to SEQ ID NO: 35863
  REGION 1..361: note = ENSP00000447740

SEQ ID NO: 35872 - protein, 104 aa, Homo sapiens
  REGION 1..104: note = ENSP00000449009
MFSSVAHLARANPFNTPHLQLVHDGLGDLRSSSPGPTGQPRRPRNLAAAAVEEQYSCDYGSGRFFILCGLGGIISCGTTHTALVPLDLVKCRMQVCFACWTRAY

SEQ ID NO: 35873 - protein, 324 aa, Homo sapiens
  REGION 1..324: note = ENSP00000449166
MFSSVAHLARANPFNTPHLQLVHDGLGDLRSSSPGPTGQPRRPRNLAAAAVEEYSCEFGSAKYYALCGFGGVLSCGLTHTAVVPLDLVKCRMQVDPQKYKGIFNGFSVTLKEDGVRGLAKGWAPTFLGYSMQGLCKFGFYEVFKVLYSNMLGEENTYLWRTSLYLAASASAEFFADIALAPMEAAKVRIQTQPGYANTLRDAAPKMYKEEGLKAFYKGVAPLWMRQIPYTMMKFACFERTVEALYKFVVPKPRSECSKPEQLVVTFVAGYIGVWKGLFARIIMIGTLTALQWFIYDSVKVYFRLPRPPPPEMPESLKKKLGLTQ

SEQ ID NO: 35874 - protein, 362 aa, Homo sapiens; identical to SEQ ID NO: 35865
  REGION 1..362: note = ENSP00000228318

SEQ ID NO: 35875 - protein, 321 aa, Homo sapiens
  REGION 1..321: note = ENSP00000306328
MATGGQQKENTLLHLFAGGCGGTVGAIFTCPLEVIKTRLQSSRLALRTVYYPQVHLGTISGAGMVRPTSVTPGLFQVLKSILEKEGPKSLFRGLGPNLVGVAPSRAVYFACYSKAKEQFNGIFVPNSNIVHIFSAGSAAFITNSLMNPIWMVKTRMQLEQKVRGSKQMNTLQCARYVYQTEGIRGFYRGLTASYAGISETIICFAIYESLKKYLKEAPLASSANGTEKNSTSFFGLMAAAALSKGCASCIAYPHEVIRTRLREEGTKYKSFVQTARLVFREEGYLAFYRGLFAQLIRQIPNTAIVLSTYELIVYLLEDRTQ

SEQ ID NO: 35876 - protein, 298 aa, Homo sapiens
  REGION 1..298: note = ENSP00000370808
MTEQAISFAKDFLAGGIAAAISKTAVAPIERVKLLLQVQHASKQIAADKQYKGIVDCIVRIPKEQGVLSFWRGNLANVIRYFPTQALNFAFKDKYKQIFLGGVDKHTQFWRYFAGNLASGGAAGATSLCFVYPLDFARTRLAADVGKSGTEREFRGLGDCLVKITKSDGIRGLYQGFSVSVQGIIIYRAAYFGVYDTAKGMLPDPKNTHIVVSWMIAQTVTAVAGVVSYPFDTVRRRMMMQSGRKGADIMYTGTVDCWRKIFRDEGGKAFFKGAWSNVLRGMGGAFVLVLYDELKKVI

SEQ ID NO: 35877 - protein, 52 aa, Homo sapiens
  REGION 1..52: note = ENSP00000368375
MIEPFGNQYIVARPVYSTNAFEENHKKTGRHHKTFLDHLKVCCSILVASIPA

SEQ ID NO: 35878 - protein, 764 aa, Homo sapiens
  REGION 1..764: note = ENSP00000345873
MIEPFGNQYIVARPVYSTNAFEENHKKTGRHHKTFLDHLKVCCSCSPQKAKRIVLSLFPIASWLPAYRLKEWLLSDIVSGISTGIVAVLQGLAFALLVDIPPVYGLYASFFPAIIYLFFGTSRHISVGPFPILSMMVGLAVSGAVSKAVPDRNATTLGLPNNSNNSSLLDDERVRVAAAASVTVLSGIIQLAFGILRIGFVVIYLSESLISGFTTAAAVHVLVSQLKFIFQLTVPSHTDPVSIFKVLYSVFSQIEKTNIADLVTALIVLLVVSIVKEINQRFKDKLPVPIPIEFIMTVIAAGVSYGCDFKNRFKVAVVGDMNPGFQPPITPDVETFQNTVGDCFGIAMVAFAVAFSVASVYSLKYDYPLDGNQELIALGLGNIVCGVFRGFAGSTALSRSAVQESTGGKTQIAGLIGAIIVLIVVLAIGFLLAPLQKSVLAALALGNLKGMLMQFAEIGRLWRKDKYDCLIWIMTFIFTIVLGLGLGLAASVAFQLLTIVFRTQFPKCSTLANIGRTNIYKNKKDYYDMYEPEGVKIFRCPSPIYFANIGFFRRKLIDAVGFSPLRILRKRNKALRKIRKLQKQGLLQVTPKGFICTVDTIKDSDEELDNNQIEVLDQPINTTDLPFHIDWNDDLPLNIEVPKISLHSLILDFSAVSFLDVSSVRGLKSILQEFIRIKVDVYIVGTDDDFIEKLNRYEFFDGEVKSSIFFLTIHDAVLHILMKKDYSTSKFNPSQEKDGKIDFTINTNGGLRNRVYEVPVETKF

SEQ ID NO: 35879 - protein, 120 aa, Homo sapiens
  REGION 1..120: note = ENSP00000395955
MIEPFGNQYIVARPVYSTNAFEENHKKTGRHHKTFLDHLKVCCSCSPQKAKRIVLSLFPIASWLPAYRLKEWLLSDIVSGISTGIVAVLQGLAFALLVDIPPVYGLYASFFPAIIYLFFG

SEQ ID NO: 35880 - protein, 685 aa, Homo sapiens
  REGION 1..685: note = ENSP00000342396
MDHAEENEILAATQRYYVERPIFSHPVLQERLHTKDKVPDSIADKLKQAFTCTPKKIRNIIYMFLPITKWLPAYKFKEYVLGDLVSGISTGVLQLPQGLAFAMLAAVPPIFGLYSSFYPVIMYCFLGTSRHISIGPFAVISLMIGGVAVRLVPDDIVIPGGVNATNGTEARDALRVKVAMSVTLLSGIIQFCLGVCRFGFVAIYLTEPLVRGFTTAAAVHVFTSMLKYLFGVKTKRYSGIFSVVYSTVAVLQNVKNLNVCSLGVGLMVFGLLLGGKEFNERFKEKLPAPIPLEFFAVVMGTGISAGFNLKESYNVDVVGTLPLGLLPPANPDTSLFHLVYVDAIAIAIVGFSVTISMAKTLANKHGYQVDGNQELIALGLCNSIGSLFQTFSISCSLSRSLVQEGTGGKTQLAGCLASLMILLVILATGFLFESLPQAVLSAIVIVNLKGMFMQFSDLPFFWRTSKIELTIWLTTFVSSLFLGLDYGLITAVIIALLTVIYRTQSPSYKVLGKLPETDVYIDIDAYEEVKEIPGIKIFQINAPIYYANSDLYSNALKRKTGVNPAVIMGARRKAMRKYAKEVGNANMANATVVKADAEVDGEDATKPEEEDGEVKYPPIVIKSTFPEEMQRFMPPGDNVHTVILDFTQVNFIDSVGVKTLAGIVKEYGDVGIYVYLAGCSAFIQR

SEQ ID NO: 35881 - protein, 335 aa, Homo sapiens
  REGION 1..335: note = ENSP00000349210
MDHAEENEILAATQRYYVERPIFSHPVLQERLHTKDKVPDSIADKLKQAFTCTPKKIRNIIYMFLPITKWLPAYKFKEYVLGDLVSGISTGVLQLPQGLAFAMLAAVPPIFGLYSSFYPVIMYCFLGTSRHISIGPFAVISLMIGGVAVRLVPDDIVIPGGVNATNGTEARDALRVKVAMSVTLLSGIIQFCLGVCRFGFVAIYLTEPLVRGFTTAAAVHVFTSMLKYLFGVKTKRYSGIFSVVYSTVAVLQNVKNLNVCSLGVGLMVFGLLLGGKEFNERFKEKLPAPIPLEFFAVVMGTGISAGFNLKESYNVDVVGTLPLGFHTEMTRRWRP

SEQ ID NO: 35882 - protein, 516 aa, Homo sapiens
  REGION 1..516: note = ENSP00000377336
MDHAEENEILAATQRYYVERPIFSHPVLQERLHTKDKVPDSIADKLKQAFTCTPKKIRNIIYMFLPITKWLPAYKFKEYVLGDLVSGISTGVLQLPQGLAFAMLAAVPPIFGLYSSFYPVIMYCFLGTSRHISIGPFAVISLMIGGVAVRLVPDDIVIPGGVNATNGTEARDALRVKVAMSVTLLSGIIQFCLGVCRFGFVAIYLTEPLVRGFTTAAAVHVFTSMLKYLFGVKTKRYSGIFSVVYSTVAVLQNVKNLNVCSLGVGLMVFGLLLGGKEFNERFKEKLPAPIPLEFFAVVMGTGISAGFNLKESYNVDVVGTLPLGLLPPANPDTSLFHLVYVDAIAIAIVGFSVTISMAKTLANKHGYQVDGNQELIALGLCNSIGSLFQTFSISCSLSRSLVQEGTGGKTQLAGCLASLMILLVILATGFLFESLPQAVLSAIVIVNLKGMFMQFSDLPFFWRTSKIELTIWLTTFVSSLFLGLDYGLITAVIIALLTVIYRTQSFHTEMTRRWRP

SEQ ID NO: 35883 - protein, 248 aa, Homo sapiens
  REGION 1..248: note = ENSP00000396833
MDHAEENEILAATQRYYVERPIFSHPVLQERLHTKDKVPDSIADKLKQAFTCTPKKIRNIIYMFLPITKWLPAYKFKEYVLGDLVSGISTGVLQLPQGLAFAMLAAVPPIFGLYSSFYPVIMYCFLGTSRHISIGPFAVISLMIGGVAVRLVPDDIVIPGGVNATNGTEARDALRVKVAMSVTLLSGIIQFCLGVCRFGFVAIYLTEPLVRGFTTAAAVHVFTSMLKYLFGVKTKRYSGIFSVVYASG

SEQ ID NO: 35884 - protein, 447 aa, Homo sapiens
  REGION 1..447: note = ENSP00000416502
MDHAEENEILAATQRYYVERPIFSHPVLQERLHTKDKVPDSIADKLKQAFTCTPKKIRNIIYMFLPITKWLPAYKFKEYVLGDLVSGISTGVLQLPQGLAFAMLAAVPPIFGLYSSFYPVIMYCFLGTSRHISIGPFAVISLMIGGVAVRLVPDDIVIPGGVNATNGTEARDALRVKVAMSVTLLSGIIQFCLGVCRFGFVAIYLTEPLVRGFTTAAAVHVFTSMLKYLFGVKTKRYSGIFSVVYSTVAVLQNVKNLNVCSLGVGLMVFGLLLGGKEFNERFKEKLPAPIPLEFFAVVMGTGISAGFNLKESYNVDVVGTLPLGLLPPANPDTSLFHLVYVDAIAIAIVGFSVTISMAKTLANKHGYQVDGNQELIALGLCNSIGSLFQTFSISCSLSRSLVQEGTGGKTQTIWLTTFVSSLFLGLDYGLITAVIIALLTVIYRTQR

SEQ ID NO: 35885 - protein, 712 aa, Homo sapiens
  REGION 1..712: note = ENSP00000377331
MDHAEENEILAATQRYYVERPIFSHPVLQERLHTKDKVPDSIADKLKQAFTCTPKKIRNIIYMFLPITKWLPAYKFKEYVLGDLVSGISTGVLQLPQGLAFAMLAAVPPIFGLYSSFYPVIMYCFLGTSRHISIGPFAVISLMIGGVAVRLVPDDIVIPGGVNATNGTEARDALRVKVAMSVTLLSGIIQFCLGVCRFGFVAIYLTEPLVRGFTTAAAVHVFTSMLKYLFGVKTKRYSGIFSVVYSTVAVLQNVKNLNVCSLGVGLMVFGLLLGGKEFNERFKEKLPAPIPLEFFAVVMGTGISAGFNLKESYNVDVVGTLPLGLLPPANPDTSLFHLVYVDAIAIAIVGFSVTISMAKTLANKHGYQVDGNQELIALGLCNSIGSLFQTFSISCSLSRSLVQEGTGGKTQLAGCLASLMILLVILATGFLFESLPQTIWLTTFVSSLFLGLDYGLITAVIIALLTVIYRTQSPSYKVLGKLPETDVYIDIDAYEEVKEIPGIKIFQINAPIYYANSDLYSNALKRKTGVNPAVIMGARRKAMRKYAKEVGNANMANATVVKADAEVDGEDATKPEEEDGEVKYPPIVIKSTFPEEMQRFMPPGDNVHTVILDFTQVNFIDSVGVKTLAGIVKEYGDVGIYVYLAGCSAQVVNDLTRNRFFENPALWELLFHSIHDAVLGSQLREALAEQEASAPPSQEDLEPNATPATPEA

SEQ ID NO: 35886 - protein, 744 aa, Homo sapiens
  REGION 1..744: note = ENSP00000304783
MDHAEENEILAATQRYYVERPIFSHPVLQERLHTKDKVPDSIADKLKQAFTCTPKKIRNIIYMFLPITKWLPAYKFKEYVLGDLVSGISTGVLQLPQGLAFAMLAAVPPIFGLYSSFYPVIMYCFLGTSRHISIGPFAVISLMIGGVAVRLVPDDIVIPGGVNATNGTEARDALRVKVAMSVTLLSGIIQFCLGVCRFGFVAIYLTEPLVRGFTTAAAVHVFTSMLKYLFGVKTKRYSGIFSVVYSTVAVLQNVKNLNVCSLGVGLMVFGLLLGGKEFNERFKEKLPAPIPLEFFAVVMGTGISAGFNLKESYNVDVVGTLPLGLLPPANPDTSLFHLVYVDAIAIAIVGFSVTISMAKTLANKHGYQVDGNQELIALGLCNSIGSLFQTFSISCSLSRSLVQEGTGGKTQLAGCLASLMILLVILATGFLFESLPQAVLSAIVIVNLKGMFMQFSDLPFFWRTSKIELTIWLTTFVSSLFLGLDYGLITAVIIALLTVIYRTQSPSYKVLGKLPETDVYIDIDAYEEVKEIPGIKIFQINAPIYYANSDLYSNALKRKTGVNPAVIMGARRKAMRKYAKEVGNANMANATVVKADAEVDGEDATKPEEEDGEVKYPPIVIKSTFPEEMQRFMPPGDNVHTVILDFTQVNFIDSVGVKTLAGIVKEYGDVGIYVYLAGCSAQVVNDLTRNRFFENPALWELLFHSIHDAVLGSQLREALAEQEASAPPSQEDLEPNATPATPEA

SEQ ID NO: 35887 - protein, 473 aa, Homo sapiens
  REGION 1..473: note = ENSP00000389018
MDHAEENEILAATQRYYVERPIFSHPVLQERLHTKDKVPDSIADKLKQAFTCTPKKIRNIIYMFLPITKWLPAYKFKEYVLGDLVSGISTGVLQLPQGLAFAMLAAVPPIFGLYSSFYPVIMYCFLGTSRHISIGPFAVISLMIGGVAVRLVPDDIVIPGGVNATNGTEARDALRVKVAMSVTLLSGIIQFCLGVCRFGFVAIYLTEPLVRGFTTAAAVHVFTSMLKYLFGVKTKRYSGIFSVVYSTVAVLQNVKNLNVCSLGVGLMVFGLLLGGKEFNERFKEKLPAPIPLEFFAVVMGTGISAGFNLKESYNVDVVGTLPLGLLPPANPDTSLFHLVYVDAIAIAIVGFSVTISMAKTLANKHGYQVDGNQELIALGLCNSIGSLFQTFSISCSLSRSLVQEGTGGKTQLAGCLASLMILLVILATGFLFESLPQTIWLTTFVSSLFLGLDYGLITAVIIALLTVIYRTQR

SEQ ID NO: 35888 - protein, 211 aa, Homo sapiens
  REGION 1..211: note = ENSP00000395568
MDHAEENEILAATQRYYVERPIFSHPVLQERLHTKDKVPDSIADKLKQAFTCTPKKIRNIIYMFLPITKWLPAYKFKEYVLGDLVSGISTGVLQLPQGPFAVISLMIGGVAVRLVPDDIVIPGGVNATNGTEARDALRVKVAMSVTLLSGIIQFCLGVCRFGFVAIYLTEPLVRGFTTAAAVHVFTSMLKYLFGVKTKRYSGIFSVVYASG

SEQ ID NO: 35889 - protein, 707 aa, Homo sapiens
  REGION 1..707: note = ENSP00000377330
MDHAEENEILAATQRYYVERPIFSHPVLQERLHTKDKVPDSIADKLKQAFTCTPKKIRNIIYMFLPITKWLPAYKFKEYVLGDLVSGISTGVLQLPQGPFAVISLMIGGVAVRLVPDDIVIPGGVNATNGTEARDALRVKVAMSVTLLSGIIQFCLGVCRFGFVAIYLTEPLVRGFTTAAAVHVFTSMLKYLFGVKTKRYSGIFSVVYSTVAVLQNVKNLNVCSLGVGLMVFGLLLGGKEFNERFKEKLPAPIPLEFFAVVMGTGISAGFNLKESYNVDVVGTLPLGLLPPANPDTSLFHLVYVDAIAIAIVGFSVTISMAKTLANKHGYQVDGNQELIALGLCNSIGSLFQTFSISCSLSRSLVQEGTGGKTQLAGCLASLMILLVILATGFLFESLPQAVLSAIVIVNLKGMFMQFSDLPFFWRTSKIELTIWLTTFVSSLFLGLDYGLITAVIIALLTVIYRTQSPSYKVLGKLPETDVYIDIDAYEEVKEIPGIKIFQINAPIYYANSDLYSNALKRKTGVNPAVIMGARRKAMRKYAKEVGNANMANATVVKADAEVDGEDATKPEEEDGEVKYPPIVIKSTFPEEMQRFMPPGDNVHTVILDFTQVNFIDSVGVKTLAGIVKEYGDVGIYVYLAGCSAQVVNDLTRNRFFENPALWELLFHSIHDAVLGSQLREALAEQEASAPPSQEDLEPNATPATPEA

SEQ ID NO: 35890 - protein, 746 aa, Homo sapiens
  REGION 1..746: note = ENSP00000377328
MDHAEENEILAATQRYYVERPIFSHPVLQERLHTKDKVPDSIADKLKQAFTCTPKKIRNIIYMFLPITKWLPAYKFKEYVLGDLVSGISTGVLQLPQGLAFAMLAAVPPIFGLYSSFYPVIMYCFLGTSRHISIGPFAVISLMIGGVAVRLVPDDIVIPGGVNATNGTEARDALRVKVAMSVTLLSGIIQFCLGVCRFGFVAIYLTEPLVRGFTTAAAVHVFTSMLKYLFGVKTKRYSGIFSVVYSTVAVLQNVKNLNVCSLGVGLMVFGLLLGGKEFNERFKEKLPAPIPLEFFAVVMGTGISAGFNLKESYNVDVVGTLPLGLLPPANPDTSLFHLVYVDAIAIAIVGFSVTISMAKTLANKHGYQVDGNQELIALGLCNSIGSLFQTFSISCSLSRSLVQEGTGGKTQLAGCLASLMILLVILATGFLFESLPQAVLSAIVIVNLKGMFMQFSDLPFFWRTSKIELTIWLTTFVSSLFLGLDYGLITAVIIALLTVIYRTQSPSYKVLGKLPETDVYIDIDAYEEVKEIPGIKIFQINAPIYYANSDLYSNALKRKTGVNPAVIMGARRKAMRKYAKEVGNANMANATVVKATQDAEVDGEDATKPEEEDGEVKYPPIVIKSTFPEEMQRFMPPGDNVHTVILDFTQVNFIDSVGVKTLAGIVKEYGDVGIYVYLAGCSAQVVNDLTRNRFFENPALWELLFHSIHDAVLGSQLREALAEQEASAPPSQEDLEPNATPATPEA

SEQ ID NO: 35891 - protein, 714 aa, Homo sapiens
  REGION 1..714: note = ENSP00000377324
MDHAEENEILAATQRYYVERPIFSHPVLQERLHTKDKVPDSIADKLKQAFTCTPKKIRNIIYMFLPITKWLPAYKFKEYVLGDLVSGISTGVLQLPQGLAFAMLAAVPPIFGLYSSFYPVIMYCFLGTSRHISIGPFAVISLMIGGVAVRLVPDDIVIPGGVNATNGTEARDALRVKVAMSVTLLSGIIQFCLGVCRFGFVAIYLTEPLVRGFTTAAAVHVFTSMLKYLFGVKTKRYSGIFSVVYSTVAVLQNVKNLNVCSLGVGLMVFGLLLGGKEFNERFKEKLPAPIPLEFFAVVMGTGISAGFNLKESYNVDVVGTLPLGLLPPANPDTSLFHLVYVDAIAIAIVGFSVTISMAKTLANKHGYQVDGNQELIALGLCNSIGSLFQTFSISCSLSRSLVQEGTGGKTQLAGCLASLMILLVILATGFLFESLPQTIWLTTFVSSLFLGLDYGLITAVIIALLTVIYRTQSPSYKVLGKLPETDVYIDIDAYEEVKEIPGIKIFQINAPIYYANSDLYSNALKRKTGVNPAVIMGARRKAMRKYAKEVGNANMANATVVKATQDAEVDGEDATKPEEEDGEVKYPPIVIKSTFPEEMQRFMPPGDNVHTVILDFTQVNFIDSVGVKTLAGIVKEYGDVGIYVYLAGCSAQVVNDLTRNRFFENPALWELLFHSIHDAVLGSQLREALAEQEASAPPSQEDLEPNATPATPEA

SEQ ID NO: 35892 - protein, 712 aa, Homo sapiens; identical to SEQ ID NO: 35885
  REGION 1..712: note = ENSP00000389733

SEQ ID NO: 35893 - protein, 746 aa, Homo sapiens; identical to SEQ ID NO: 35890
  REGION 1..746: note = ENSP00000346325

SEQ ID NO: 35894 - protein, 970 aa, Homo sapiens
  REGION 1..970: note = ENSP00000417638
MAQLERSAISGFSSKSRRNSFAYDVKREVYNEETFQQEHKRKASSSGNMNINITTFRHHVQCRCSWHRFLRCVLTIFPFLEWMCMYRLKDWLLGDLLAGISVGLVQVPQGLTLSLLARQLIPPLNIAYAAFCSSVIYVIFGSCHQMSIGSFFLVSALLINVLKVSPFNNGQLVMGSFVKNEFSAPSYLMGYNKSLSVVATTTFLTGIIQLIMGVLGLGFIATYLPESAMSAYLAAVALHIMLSQLTFIFGIMISFHAGPISFFYDIINYCVALPKANSTSILVFLTVVVALRINKCIRISFNQYPIEFPMELFLIIGFTVIANKISMATETSQTLIDMIPYSFLLPVTPDFSLLPKIILQAFSLSLVSSFLLIFLGKKIASLHNYSVNSNQDLIAIGLCNVVSSFFRSCVFTGAIARTIIQDKSGGRQQFASLVGAGVMLLLMVKMGHFFYTLPNAVLAGIILSNVIPYLETISNLPSLWRQDQYDCALWMMTFSSSIFLGLDIGLIISVVSAFFITTVRSHRAKILLLGQIPNTNIYRSINDYREIITIPGVKIFQCCSSITFVNVYYLKHKLLKEVDMVKVPLKEEEIFSLFNSSDTNLQGGKICRCFCNCDDLEPLPRILYTERFENKLDPEASSINLIHCSHFESMNTSQTASEDQVPYTVSSVSQKNQGQQYEEVEEVWLPNNSSRNSSPGLPDVAESQGRRSLIPYSDASLLPSVHTIILDFSMVHYVDSRGLVVLRQICNAFQNANILILIAGCHSSIVRAFERNDFFDAGITKTQLFLSVHDAVLFALSRKVIGSSELSIDESETVIRETYSETDKNDNSRYKMSSSFLGSQKNVSPGFIKIQQPVEEESELDLELESEQEAGLGLDLDLDRELEPEMEPKAETETKTQTEMEPQPETEPEMEPNPKSRPRAHTFPQQRYWPMYHPSMASTQSQTQTRTWSVERRRHPMDSYSPEGNSNEDV

SEQ ID NO: 35895 - protein, 865 aa, Homo sapiens
  REGION 1..865: note = ENSP00000378100
MAQLERSAISGFSSKSRRNSFAYDVKREVYNEETFQQEHKRKASSSGNMNINITTFRHHVQCRCSWHRFLRCVLTIFPFLEWMCMYRLKDWLLGDLLAGISVGLVQVPQGLTLSLLARQLIPPLNIAYAAFCSSVIYVIFGSCHQMSIGSFFLVSALLINVLKVSPFNNGQLVMGSFVKNEFSAPSYLMGYNKSLSVVATTTFLTGIIQIIGFTVIANKISMATETSQTLIDMIPYSFLLPVTPDFSLLPKIILQAFSLSLVSSFLLIFLGKKIASLHNYSVNSNQDLIAIGLCNVVSSFFRSCVFTGAIARTIIQDKSGGRQQFASLVGAGVMLLLMVKMGHFFYTLPNAVLAGIILSNVIPYLETISNLPSLWRQDQYDCALWMMTFSSSIFLGLDIGLIISVVSAFFITTVRSHRAKILLLGQIPNTNIYRSINDYREIITIPGVKIFQCCSSITFVNVYYLKHKLLKEVDMVKVPLKEEEIFSLFNSSDTNLQGGKICRCFCNCDDLEPLPRILYTERFENKLDPEASSINLIHCSHFESMNTSQTASEDQVPYTVSSVSQKNQGQQYEEVEEVWLPNNSSRNSSPGLPDVAESQGRRSLIPYSDASLLPSVHTIILDFSMVHYVDSRGLVVLRQICNAFQNANILILIAGCHSSIVRAFERNDFFDAGITKTQLFLSVHDAVLFALSRKVIGSSELSIDESETVIRETYSETDKNDNSRYKMSSSFLGSQKNVSPGFIKIQQPVEEESELDLELESEQEAGLGLDLDLDRELEPEMEPKAETETKTQTEMEPQPETEPEMEPNPKSRPRAHTFPQQRYWPMYHPSMASTQSQTQTRTWSVERRRHPMDSYSPEGNSNEDV

SEQ ID NO: 35896 - protein, 970 aa, Homo sapiens; identical to SEQ ID NO: 35894
  REGION 1..970: note = ENSP00000347778

SEQ ID NO: 35897 - protein, 320 aa, Homo sapiens
  REGION 1..320: note = ENSP00000418107
  VARIANT 1: note = Any amino acid
XFYTLPNAVLAGIILSNVIPYLETISNLPSLWRQDQYDCALWMMTFSSSIFLGLDIGLIISVVSAFFITTVRSHRAKILLLGQIPNTNIYRSINDYREIITIPGVKIFQCCSSITFVNVYYLKHKLLKEVDMVKVPLKEEEIFSLFNSSDTNLQGGKICRCFCNCDDLEPLPRILYTERFENKLDPEASSINLIHCSHFESMNTSQTASEDQVPYTVSSVSQKNQGQQYEEVEEVWLPNNSSRNSSPGLPDVAESQGRRSLIPYSDASLLPSVHTIILDFSMVHYVDSRGLVVLRQVSTEEALAGALIPLLPSQPHPDPD

SEQ ID NO: 35898 - protein, 184 aa, Homo sapiens
  REGION 1..184: note = ENSP00000419700
  VARIANT 1: note = Any amino acid
XVYRFTKYQGDPTTQPARNARGLGHNGSGTAAGIRVRSAASQARAVWDPSARTPAPAKEPGEPLLGDAWAPGAAGPRAGAASVTGRYPGMAQLERSAISGFSSKSRRNSFAYDVKREVYNEETFQQEHKRKASSSGNMNINITTFRHHVQCRMDVYVSIKGLASGRLTCWYKCWPCASSPRPDT

SEQ ID NO: 35899 - protein, 190 aa, Homo sapiens
  REGION 1..190: note = ENSP00000420488
MFRTRGLAPNRPSIKNSKTSEREGALVYRFTKYQGDPTTQPARNARGLGHNGSGTAAGIRVRSAASQARAVWDPSARTPAPAKEPGMAQLERSAISGFSSKSRRNSFAYDVKREVYNEETFQQEHKRKASSSGNMNINITTFRHHVQCRCSWHRFLRCVLTIFPFLEWMCMYRLKDWLLGDLLAGISVGL

SEQ ID NO: 35900 - protein, 162 aa, Homo sapiens
  REGION 1..162: note = ENSP00000421759
MKDSVPQGVISLKEKLSTSPDEPVPRSHHVVSLLKSTCLYIFTSGTTGLPKAAVISQLQVLRGSAVLWAFGCTAHDIVYITLPLYHSSAAILGISGCVELGATCVLKKKFSASQFWSDCKKYDVTVFQYIGELCRYLCKQSKREGEKDHKVRLAIGNGIRSD

SEQ ID NO: 35901 - protein, 619 aa, Homo sapiens
  REGION 1..619: note = ENSP00000262462
MLLSWLTVLGAGMVVLHFLQKLLFPYFWDDFWFVLKVVLIIIRLKKYEKRGELVTVLDKFLSHAKRQPRKPFIIYEGDIYTYQDVDKRSSRVAHVFLNHSSLKKGDTVALLMSNEPDFVHVWFGLAKLGCVVAFLNTNIRSNSLLNCIRACGPRALVVGADLLGTVEEILPSLSENISVWGMKDSVPQGVISLKEKLSTSPDEPVPRSHHVVSLLKSTCLYIFTSGTTGLPKAAVISQLQVLRGSAVLWAFGCTAHDIVYITLPLYHSSAAILGISGCVELGATCVLKKKFSASQFWSDCKKYDVTVFQYIGELCRYLCKQSKREGEKDHKVRLAIGNGIRSDVWREFLDRFGNIKVCELYAATESSISFMNYTGRIGAIGRTNLFYKLLSTFDLIKYDFQKDEPMRNEQGWCIHVKKGEPGLLISRVNAKNPFFGYAGPYKHTKDKLLCDVFKKGDVYLNTGDLIVQDQDNFLYFWDRTGDTFRWKGENVATTEVADVIGMLDFIQEANVYGVAISGYEGRAGMASIILKPNTSLDLEKVYEQVVTFLPAYACPRFLRIQEKMEATGTFKLLKHQLVEDGFNPLKISEPLYFMDNLKKSYVLLTRELYDQIMLGEIKL

SEQ ID NO: 35902 - protein, 619 aa, Homo sapiens; identical to SEQ ID NO: 35901
  REGION 1..619: note = ENSP00000378684

SEQ ID NO: 35903 - protein, 619 aa, Homo sapiens; identical to SEQ ID NO: 35901
  REGION 1..619: note = ENSP00000421024

SEQ ID NO: 35904 - protein, 541 aa, Homo sapiens
  REGION 1..541: note = ENSP00000352216
MGHSPPVLPLCASVSLLGGLTFGYELAVISGALLPLQLDFGLSCLEQEFLVGSLLLGALLASLVGGFLIDCYGRKQAILGSNLVLLAGSLTLGLAGSLAWLVLGRAVVGFAISLSSMACCIYVSELVGPRQRGVLVSLYEAGITVGILLSYALNYALAGTPWGWRHMFGWATAPAVLQSLSLLFLPAGTDETATHKDLIPLQGGEAPKLGPGRPRYSFLDLFRARDNMRGRTTVGLGLVLFQQLTGQPNVLCYASTIFSSVGFHGGSSAVLASVGLGAVKVAATLTAMGLVDRAGRRALLLAGCALMALSVSGIGLVSFAVPMDSGPSCLAVPNATGQTGLPGDSGLLQDSSLPPIPRTNEDQREPILSTAKKTKPHPRSGDPSAPPRLALSSALPGPPLPARGHALLRWTALLCLMVFVSAFSFGFGPVTWLVLSEIYPVEIRGRAFAFCNSFNWAANLFISLSFLDLIGTIGLSWTFLLYGLTAVLGLGFIYLFVPETKGQSLAEIDQQFQKRRFTLSFGHRQNSTGIPYSRIEISAAS

SEQ ID NO: 35905 - protein, 13 aa, Homo sapiens
  REGION 1..13: note = ENSP00000478679
MAPTRAQALSRAP

SEQ ID NO: 35906 - protein, 648 aa, Homo sapiens
  REGION 1..648: note = ENSP00000280871
MSRKASENVEYTLRSLSSLMGERRRKQPEPDAASAAGECSLLAAAESSTSLQSAGAGGGGVGDLERAARRQFQQDETPAFVYVVAVFSALGGFLFGYDTGVVSGAMLLLKRQLSLDALWQELLVSSTVGAAAVSALAGGALNGVFGRRAAILLASALFTAGSAVLAAANNKETLLAGRLVVGLGIGIASMTVPVYIAEVSPPNLRGRLVTINTLFITGGQFFASVVDGAFSYLQKDGWRYMLGLAAVPAVIQFFGFLFLPESPRWLIQKGQTQKARRILSQMRGNQTIDEEYDSIKNNIEEEEKEVGSAGPVICRMLSYPPTRRALIVGCGLQMFQQLSGINTIMYYSATILQMSGVEDDRLAIWLASVTAFTNFIFTLVGVWLVEKVGRRKLTFGSLAGTTVALIILALGFVLSAQVSPRITFKPIAPSGQNATCTRYSYCNECMLDPDCGFCYKMNKSTVIDSSCVPVNKASTNEAAWGRCENETKFKTEDIFWAYNFCPTPYSWTALLGLILYLVFFAPGMGPMPWTVNSEIYPLWARSTGNACSSGINWIFNVLVSLTFLHTAEYLTYYGAFFLYAGFAAVGLLFIYGCLPETKGKKLEEIESLFDNRLCTCGTSDSDEGRYIEYIRVKGSNYHLSDNDASDVE

SEQ ID NO: 35907 - protein, 357 aa, Homo sapiens
  REGION 1..357: note = ENSP00000370239
MSRKASENVEYTLRSLSSLMGERRRKQPEPDAASAAGECSLLAAAESSTSLQSAGAGGGGVGDLERAARRQFQQDETPAFVYVVAVFSALGGFLFGYDTGVVSGAMLLLKRQLSLDALWQELLVSSTVGAAAVSALAGGALNGVFGRRAAILLASALFTAGSAVLAAANNKETLLAGRLVVGLGIGIASMTVPVYIAEVSPPNLRGRLVTINTLFITGGQFFASVVDGAFSYLQKDGWRYMLGLAAVPAVIQFFGFLFLPESPRWLIQKGQTQKARRILSQMRGNQTIDEEYDSIKNNIEEEEKEVGSAGPVICRMLSYPPTRRALIVGCGLQMFQQLSGINTIMYVFLSGFLLKRL

SEQ ID NO: 35908 - protein, 496 aa, Homo sapiens
  REGION 1..496: note = ENSP00000075120
MGTQKVTPALIFAITVATIGSFQFGYNTGVINAPEKIIKEFINKTLTDKGNAPPSEVLLTSLWSLSVAIFSVGGMIGSFSVGLFVNRFGRRNSMLIVNLLAVTGGCFMGLCKVAKSVEMLILGRLVIGLFCGLCTGFVPMYIGEISPTALRGAFGTLNQLGIVVGILVAQIFGLEFILGSEELWPLLLGFTILPAILQSAALPFCPESPRFLLINRKEEENAKQILQRLWGTQDVSQDIQEMKDESARMSQEKQVTVLELFRVSSYRQPIIISIVLQLSQQLSGINAVFYYSTGIFKDAGVQEPIYATIGAGVVNTIFTVVSLFLVERAGRRTLHMIGLGGMAFCSTLMTVSLLLKDNYNGMSFVCIGAILVFVAFFEIGPGPIPWFIVAELFSQGPRPAAMAVAGCSNWTSNFLVGLLFPSAAHYLGAYVFIIFTGFLITFLAFTFFKVPETRGRTFEDITRAFEGQAHGADRSGKDGVMEMNSIEPAKETTTNV

SEQ ID NO: 35909 - protein, 141 aa, Homo sapiens
  REGION 1..141: note = ENSP00000440750
MGTQKIIKEFINKTLTDKGNAPPSEVLLTSLWSLSVAIFSVGGMIGSFSVGLFVNRFGRRNSMLIVNLLAVTGGCFMGLCKVAKSVEMLILGRLVIGLFCGLCTGFVPMYIGEISPTALRGAFGTLNQLGIVVGILVAQIF

SEQ ID NO: 35910 - protein, 48 aa, Homo sapiens
  REGION 1..48: note = ENSP00000441496
MGTQKVTPALIFAITVATIGSFQFGYNTGVINAPEKSVLPPTLLFCRS

SEQ ID NO: 35911 - protein, 509 aa, Homo sapiens
  REGION 1..509: note = ENSP00000320935
MPSGFQQIGSEDGEPPQQRVTGTLVLAVFSAVLGSLQFGYNIGVINAPQKVIEQSYNETWLGRQGPEGPSSIPPGTLTTLWALSVAIFSVGGMISSFLIGIISQWLGRKRAMLVNNVLAVLGGSLMGLANAAASYEMLILGRFLIGAYSGLTSGLVPMYVGEIAPTHLRGALGTLNQLAIVIGILIAQVLGLESLLGTASLWPLLLGLTVLPALLQLVLLPFCPESPRYLYIIQNLEGPARKSLKRLTGWADVSGVLAELKDEKRKLERERPLSLLQLLGSRTHRQPLIIAVVLQLSQQLSGINAVFYYSTSIFETAGVGQPAYATIGAGVVNTVFTLVSVLLVERAGRRTLHLLGLAGMCGCAILMTVALLLLERVPAMSYVSIVAIFGFVAFFEIGPGPIPWFIVAELFSQGPRPAAMAVAGFSNWTSNFIIGMGFQYVAEAMGPYVFLLFAVLLLGFFIFTFLRVPETRGRTFDQISAAFHRTPSLLEQEVKPSTELEYLGPDEND

SEQ ID NO: 35912 - protein, 415 aa, Homo sapiens
  REGION 1..415: note = ENSP00000461086
MPSGFQQIGSEDGEPPQQRVTGTLVLAVFSAVLGSLQFGYNIGVINAPQKVIEQSYNETWLGRQGPEGPSSIPPGTLTTLWALSVAIFSVGGMISSFLIGIISQWLGRKRAMLVNNVLAVLGGSLMGLANAAASYEMLILGRFLIGAYSGLTSGLVPMYVGEIAPTHLRGALGTLNQLAIVIGILIAQVLGLESLLGTASLWPLLLGLTVLPALLQLVLLPFCPESPRYLYIIQNLEGPARKSLKRLTGWADVSGVLAELKDEKRKLERERPLSLLQLLGSRTHRQPLIIAVVLQLSQQLSGINAVFYYSTSIFETAGVGQPAYATIGAGVVNTVFTLVSVTAHLWNGPSHWLHLPGCPGGVVGGAGGAPDAPSPGPGGHVWLCHPDDCGSAPAGASSSHELRLHCGHLWLRGIF

SEQ ID NO: 35913 - protein, 461 aa, Homo sapiens
  REGION 1..461: note = ENSP00000459864
MPSGFQQIGSEDGEPPQQRVTGTLVLAVFSAVLGSLQFGYNIGVINAPQKVIEQSYNETWLGRQGPEGPSSIPPGTLTTLWALSVAIFSVGGMISSFLIGIISQWLGRKRAMLVNNVLAVLGGSLMGLANAAASYEMLILGRFLIGAYSGLTSGLVPMYVGEIAPTHLRGALGTLNQLAIVIGILIAQVLGLESLLGTASLWPLLLGLTVLPALLQLVLLPFCPESPRYLYIIQNLEGPARKSLKRLTGWADVSGVLAELKDEKRKLERERPLSLLQLLGSRTHRQPLIIAVVLQLSQQLSGINAVFYYSTSIFETAGVGQPAYATIGAGVVNTVFTLVSVLLVERAGRRTLHLLGLAGMCGCAILMTVALLLLERVPAMSYVSIVAIFGFVAFFEIGPGPIPWFIVAELFSQGPRPAAMAVAGFSNWTSNFIIGMGFQYVAVGPPAPASHTVGQRWASHS

SEQ ID NO: 35914 - protein, 219 aa, Homo sapiens
  REGION 1..219: note = ENSP00000459056
MPSGFQQIGSEDGEPPQQRVTGTLVLAVFSAVLGSLQFGYNIGVINAPQKVIEQSYNETWLGRQGPEGPSSIPPGTLTTLWALSVAIFSVGGMISSFLIGIISQWLGRKRAMLVNNVLAVLGGSLMGLANAAASYEMLILGRFLIGAYSGAGLGVPPGHCQPVATAPGPHSATCPPAAGPAALLSREPPLPLHHPESRGACQKESEAPDRLGRCFWSAG

SEQ ID NO: 35915 - protein, 451 aa, Homo sapiens
  REGION 1..451: note = ENSP00000396887
MDGEPPQQRVTGTLVLAVFSAVLGSLQFGYNIGVINAPQKVIEQSYNETWLGRQGPEGPSSIPPGTLTTLWALSVAIFSVGGMISSFLIGIISQWLGRKRAMLVNNVLAVLGGSLMGLANAAASYEMLILGRFLIGAYSGLTSGLVPMYVGEIAPTHLRGALGTLNQLAIVIGILIAQVLGLESLLGTASLWPLLLGLTVLPALLQLVLLPFCPESPRYLYIIQNLEGPARKSLKRLTGWADVSGVLAELKDEKRKLERERPLSLLQLLGSRTHRQPLIIAVVLQLSQQLSGINAVFYYSTSIFETAGVGQPAYATIGAGVVNTVFTLVSVLLVERAGRRTLHLLGLAGMCGCAILMTVALLLLERVPAMSYVSIVAIFGFVAFFEIGPGPIPWFIVAELFSQGPRPAAMAVAGFSNWTSNFIIGMGFQYVAVGPPAPASHTVGQRWASHS

SEQ ID NO: 35916 - protein, 388 aa, Homo sapiens
  REGION 1..388: note = ENSP00000233535
MEPSPAAGGLETTRLVSPRDRGGAGGSLRLKSLFTEPSEPLPEESKPVEMPFHHCHRDPLPPPGLTPERLHARRQLYAACAVCFVFMAGEVVGGYLAHSLAIMTDAAHLLADVGSMMGSLFSLWLSTRPATRTMTFGWHRSETLGALASVVSLWMVTGILLYLAFVRLLHSDYHIEGGAMLLTASIAVCANLLMAFVLHQAGPPHSHGSRGAEYAPLEEGPEEPLPLGNTSVRAAFVHVLGDLLQSFGVLAASILIYFKPQYKAADPISTFLFSICALGSTAPTLRDVLRILMEGTPRNVGFEPVRDTLLSVPGVRATHELHLWALTLTYHVASAHLAIDSTADPEAVLAEASSRLYSRFGFSSCTLQVEQYQPEMAQCLRCQEPPQA

SEQ ID NO: 35917 - protein, 302 aa, Homo sapiens
  REGION 1..302: note = ENSP00000388219
  VARIANT 1: note = Any amino acid
XTRLVSPRDRGGAGGSLRLKSLFTEPSEPLPEESKPVEMPFHHCHRDPLPPPGLTPERLHARRQLYAACAVCFVFMAGEVVGGYLAHSLAIMTDAAHLLADVGSMMGSLFSLWLSTRPATRTMTFGWHRSEWPLCCTRLGPPTATGLGEQSMHRWRRGLKSPCPWGTPASGRHLCTCWGTSCRALGYWLPPSSSTSSLNTRQPTPSAPSSSPSVPLDPPLPPSETFFESSWKVPPAMWGSNLCGIRCCRCQESGQPMSCTCGPLRSLTMLPLHTWPSTPPLTLKPSWLKPHPGSTPGLDSPA

SEQ ID NO: 35918 - protein, 240 aa, Homo sapiens
  REGION 1..240: note = ENSP00000414320
MPFHHCHRDPLPPPGLTPERLHARRQLYAACAVCFVFMAGEVVGGYLAHSLAIMTDAAHLLADVGSMMGSLFSLWLSTRPATRTMTFGWHRSETLGALASVVSLWMVTGILLYLAFVRLLHSDYHIEGGAMLLTASIAVCANLLMAFVLHQAGPPHSHGSRGAEYAPLEEGPEEPLPLGNTSVRAAFVHVLGDLLQSFGVLAASILIYFKPQYKAADPISTFLFSICALGSTAPTLRDVL

SEQ ID NO: 35919 - protein, 230 aa, Homo sapiens
  REGION 1..230: note = ENSP00000393545
MAQLTPGNTMGLLTVADESLFTEPSEPLPEESKPVEMPFHHCHRDPLPPPGLTPERLHARRQLYAACAVCFVFMAGEVVGGYLAHSLAIMTDAAHLLADVGSMMGSLFSLWLSTRPATRTMTFGWHRSETLGALASVVSLWMVTGILLYLAFVRLLHSDYHIEGGAMLLTASIAVCANLLMAFVLHQAGPPHSHGSRGAEYAPLEEGPEEPLPLGNTSVRAAFVHVLGDL

SEQ ID NO: 35920 - protein, 170 aa, Homo sapiens
  REGION 1..170: note = ENSP00000403959
MHRVVVVGRSLFTEPSEPLPEESKPVEMPFHHCHRDPLPPPGLTPERLHARRQLYAACAVCFVFMAGEVVGGYLAHSLAIMTDAAHLLADVGSMMGSLFSLWLSTRPATRTMTFGWHRSETLGALASVVSLWMVTGILLYLAFVRLLHSDYHIEGGAMLLTASIAVCANL

SEQ ID NO: 35921 - protein, 110 aa, Homo sapiens
  REGION 1..110: note = ENSP00000403912
MPFHHCHRDPLPPPGLTPERLHARRQLYAACAVCFVFMAGEVVGGYLAHSLAIMTDAAHLLADVGSMMGSLFSLWLSTRPATRTMTFGWHRSETLGALASVVSLWMVTGI

SEQ ID NO: 35922 - protein, 98 aa, Homo sapiens
  REGION 1..98: note = ENSP00000392673
MPFHHCHRDPLPPPGLTPERLHARRQLYAACAVCFVFMAGEVVGGYLAHSLAIMTDAAHLLADVGSMMGSLFSLWLSTRPATRTMTFGWHRSETLGAL

SEQ ID NO: 35923 - protein, 143 aa, Homo sapiens
  REGION 1..143: note = ENSP00000259392
MAMHFIFSDTAVLLFDFWSVHSPAGMALSVLVLLLLAVLYEGIKVGKAKLLNQVLVNLPTSISQQTIAETDGDSAGSDSFPVGRTHHRWYLCHFGQSLIHVIQVVIGYFIMLAVMSYNTWIFLGVVLGSAVGYYLAYPLLSTA

SEQ ID NO: 35924 - protein, 73 aa, Homo sapiens
  REGION 1..73: note = ENSP00000363337
MAMHFIFSDTAVLLFDFWSVHSPAGQETKAQRQEERLVQGHTAWPFRCWCSCFWLYCMKASRLAKPSCSTRYW

SEQ ID NO: 35925 - protein, 525 aa, Homo sapiens
  REGION 1..525: note = ENSP00000217420
MATLLRSKLSNVATSVSNKSQAKMSGMFARMGFQAATDEEAVGFAHCDDLDFEHRQGLQMDILKAEGEPCGDEGAEAPVEGDIHYQRGSGAPLPPSGSKDQVGGGGEFGGHDKPKITAWEAGWNVTNAIQGMFVLGLPYAILHGGYLGLFLIIFAAVVCCYTGKILIACLYEENEDGEVVRVRDSYVAIANACCAPRFPTLGGRVVNVAQIIELVMTCILYVVVSGNLMYNSFPGLPVSQKSWSIIATAVLLPCAFLKNLKAVSKFSLLCTLAHFVINILVIAYCLSRARDWAWEKVKFYIDVKKFPISIGIIVFSYTSQIFLPSLEGNMQQPSEFHCMMNWTHIAACVLKGLFALVAYLTWADETKEVITDNLPGSIRAVVNIFLVAKALLSYPLPFFAAVEVLEKSLFQEGSRAFFPACYSGDGRLKSWGLTLRCALVVFTLLMAIYVPHFALLMGLTGSLTGAGLCFLLPSLFHLRLLWRKLLWHQVFFDVAIFVIGGICSVSGFVHSLEGLIEAYRTNAED

SEQ ID NO: 35926 - protein, 355 aa, Homo sapiens
  REGION 1..355: note = ENSP00000235345
MAEVHRRQHARVKGEAPAKSSTLRDEEELGMASAETLTVFLKLLAAGFYGVSSFLIVVVNKSVLTNYRFPSSLCVGLGQMVATVAVLWVGKALRVVKFPDLDRNVPRKTFPLPLLYFGNQITGLFSTKKLNLPMFTVLRRFSILFTMFAEGVLLKKTFSWGIKMTVFAMIIGAFVAASSDLAFDLEGYAFILINDVLTAANGAYVKQKLDSKELGKYGLLYYNALFMILPTLAIAYFTGDAQKAVEFEGWADTLFLLQFTLSCVMGFILMYATVLCTQYNSALTTTIVGCIKNILITYIGMVFGGDYIFTWTNFIGLNISIAGSLVYSYITFTEEQLSKQSEANNKLDIKGKGAV

SEQ ID NO: 35927 - protein, 408 aa, Homo sapiens
  REGION 1..408: note = ENSP00000353557
MIPPEQPQQQLQPPSPAPPNHVVTTIENLPAEGSGGGGSLSASSRAGVRQRIRKVLNREMLISVALGQVLSLLICGIGLTSKYLSEDFHANTPVFQSFLNYILLFLVYTTTLAVRQGEENLLAILRRRWWKYMILGLIDLEANYLVVKAYQYTTLTSIQLLDCFVIPVVILLSWFFLLIRYKAVHFIGIVVCILGMGCMVGADVLVGRHQGAGENKLVGDLLVLGGATLYGISNVWEEYIIRTLSRVEFLGMIGLFGAFFSGIQLAIMEHKELLKVPWDWQIGLLYVGFSACMFGLYSFMPVVIKKTSATSVNLSLLTADLYSLFCGLFLFHYKFSGLYLLSFFTILIGLVLYSSTSTYIAQDPRVYKQFRNPSGPVVDLPTTAQVEPSVTYTSLGQETEEEPHVRVA

SEQ ID NO: 35928 - protein, 349 aa, Homo sapiens
  REGION 1..349: note = ENSP00000484738
MLISVALGQVLSLLICGIGLTSKYLSEDFHANTPVFQSFLNYILLFLVYTTTLAVRQGEENLLAILRRRWWKYMILGLIDLEANYLVVKAYQYTTLTSIQLLDCFVIPVVILLSWFFLLIRYKAVHFIGIVVCILGMGCMVGADVLVGRHQGAGENKLVGDLLVLGGATLYGISNVWEEYIIRTLSRVEFLGMIGLFGAFFSGIQLAIMEHKELLKVPWDWQIGLLYVGFSACMFGLYSFMPVVIKKTSATSVNLSLLTADLYSLFCGLFLFHYKFSGLYLLSFFTILIGLVLYSSTSTYIAQDPRVYKQFRNPSGPVVDLPTTAQVEPSVTYTSLGQETEEEPHVRVA

SEQ ID NO: 35929 - protein, 485 aa, Homo sapiens
  REGION 1..485: note = ENSP00000452086
MDVKAAPNGVATIEDRILRITGYYGYYPGYSSQKSTSRSSVTRCKPGANCPSSHSGISRQLSPLSVTEDSSAPILELQNQGSSGVCGHRVERQNRSADDGTQTHSENSSQENRIKARCLSCTSMVLKGIWGLLIILSVSSSWVGTTQIVKITYKNFYCPFFMTWFSTNWNIMFFPVYYSGHLATAQEKQSPMKKFRECSRIFGEDGLTLKLFLKRTAPFSILWTLTNYLYLLALKKLTATDVSALFCCNKAFVFLLSWIVLKDRFMGVRIVAAIMAITGIVMMAYADNFHADSIIGVAFAVGSASTSALYKVLFKMFLGSANFGEAAHFVSTLGFFNLIFISFTPVILYFTKVEHWSSFAALPWGCLCGMAGLWLAFNILVNVGVVLTYPILISIGTVLSVPGNAAVDLLKQEVIFNVVRLAATIIICIGFLLMLLPEEWDEITLRFINSLKEKKSEEHVDDVTDPSIHLRGRGRANGTVSIPLA

SEQ ID NO: 35930 - protein, 362 aa, Homo sapiens
  REGION 1..362: note = ENSP00000451990
MVLKGIWGLLIILSVSSSWVGTTQIVKITYKNFYCPFFMTWFSTNWNIMFFPVYYSGHLATAQEKQSPMKKFRECSRIFGEDGLTLKLFLKRTAPFSILWTLTNYLYLLALKKLTATDVSALFCCNKAFVFLLSWIVLKDRFMGVRIVAAIMAITGIVMMAYADNFHADSIIGVAFAVGSASTSALYKVLFKMFLGSANFGEAAHFVSTLGFFNLIFISFTPVILYFTKVEHWSSFAALPWGCLCGMAGLWLAFNILVNVGVVLTYPILISIGTVLSVPGNAAVDLLKQEVIFNVVRLAATIIICIGFLLMLLPEEWDEITLRFINSLKEKKSEEHVDDVTDPSIHLRGRGRANGTVSIPLA

SEQ ID NO: 35931 - protein, 151 aa, Homo sapiens
  REGION 1..151: note = ENSP00000450836
MVLKGIWGLLIILSVSSSWVGTTQIVKITYKNFYCPFFMTWFSTNWNIMFFPVYYSGHLATAQEKQSPMKKFRECSRIFGEDGLTLKLFLKRTAPFSILWTLTNYLYLLALKKLTATDVSALFCCNKAFVFLLSWIVLKDRFMGVRIAGKP

SEQ ID NO: 35932 - protein, 46 aa, Homo sapiens
  REGION 1..46: note = ENSP00000452196
  VARIANT 1: note = Any amino acid
XYLLALKKLTATDVSALFCCNKAFVFLLSWIVLKDRFMGVRIAGKP

SEQ ID NO: 35933 - protein, 521 aa, Homo sapiens
  REGION 1..521: note = ENSP00000342518
MDELLLDLFHKLTSGRQLAAGNGLCGISHKEQEVWKPGHNILVKMRKEDKSLVWLIHSTLARYTQVTNFLGTSRSSVTRCKPGANCPSSHSGISRQLSPLSVTEDSSAPILELQNQGSSGVCGHRVERQNRSADDGTQTHSENSSQENRIKARCLSCTSMVLKGIWGLLIILSVSSSWVGTTQIVKITYKNFYCPFFMTWFSTNWNIMFFPVYYSGHLATAQEKQSPMKKFRECSRIFGEDGLTLKLFLKRTAPFSILWTLTNYLYLLALKKLTATDVSALFCCNKAFVFLLSWIVLKDRFMGVRIVAAIMAITGIVMMAYADNFHADSIIGVAFAVGSASTSALYKVLFKMFLGSANFGEAAHFVSTLGFFNLIFISFTPVILYFTKVEHWSSFAALPWGCLCGMAGLWLAFNILVNVGVVLTYPILISIGTVLSVPGNAAVDLLKQEVIFNVVRLAATIIICIGFLLMLLPEEWDEITLRFINSLKEKKSEEHVDDVTDPSIHLRGRGRANGTVSIPLA

SEQ ID NO: 35934 - protein, 487 aa, Homo sapiens
  REGION 1..487: note = ENSP00000381634
MMHFKSGLELTELQNMTVPEDDNISNDSNDFTEVENGQINSKFISDRESRRSLTNSHLEKKKCDEYIPGTTSLGMSVFNLSNAIMGSGILGLAFALANTGILLFLVLLTSVTLLSIYSINLLLICSKETGCMVYEKLGEQVFGTTGKFVIFGATSLQNTGAMLSYLFIVKNELPSAIKFLMGKEETFSAWYVDGRVLVVIVTFGIILPLCLLKNLGYLGYTSGFSLSCMVFFLIVVIYKKFQIPCIVPELNSTISANSTNADTCTPKYVTFNSKTVYALPTIAFAFVCHPSVLPIYSELKDRSQKKMQMVSNISFFAMFVMYFLTAIFGYLTFYDNVQSDLLHKYQSKDDILILTVRLAVIVAVILTVPVLFFTVRSSLFELAKKTKFNLCRHTVVTCILLVVINLLVIFIPSMKDIFGVVGVTSANMLIFILPSSLYLKITDQDGDKGTQRIWAALFLGLGVLFSLVSIPLVIYDWACSSSSDEGH

SEQ ID NO: 35935 - protein, 487 aa, Homo sapiens; identical to SEQ ID NO: 35934
  REGION 1..487: note = ENSP00000449607

SEQ ID NO: 35936 - protein, 487 aa, Homo sapiens; identical to SEQ ID NO: 35934
  REGION 1..487: note = ENSP00000398142

SEQ ID NO: 35937 - protein, 487 aa, Homo sapiens; identical to SEQ ID NO: 35934
  REGION 1..487: note = ENSP00000447853

SEQ ID NO: 35938 - protein, 503 aa, Homo sapiens
  REGION 1..503: note = ENSP00000449756
MMHFKSGLELTELQNMTVPEDDNISNDSNDFTEVENGQINSKFISDRESRRSLTNSHLEKKKCDEYIPGTTSLGMSVFNLSNAIMGSGILGLAFALANTGILLFLVLLTSVTLLSIYSINLLLICSKETGCMVYEKLGEQVFGTTGKFVIFGATSLQNTGAMLSYLFIVKNELPSAIKFLMGKEETFSAWYVDGRVLVVIVTFGIILPLCLLKNLGYLGYTSGFSLSCMVFFLIVVIYKKFQIPCIVPELNSTISANSTNADTCTPKYVTFNSKTVYALPTIAFAFVCHPSVLPIYSELKDRSQKKMQMVSNISFFAMFVMYFLTAIFGYLTFYDNVQSDLLHKYQSKDDILILTVRLAVIVAVILTVPVLFFTVRSSLFELAKKTKFNLCRHTVVTCILLVVINLLVIFIPSMKDIFGVVGVTSANMLIFILPSSLYLKITDQDGDKGTQRIWLFLFLQFPVQPCWLSECIILLPAALSLNMLKRKELIILCSLDSGFSNLY

SEQ ID NO: 35939 - protein, 78 aa, Homo sapiens
  REGION 1..78: note = ENSP00000449744
MMHFKSGLELTELQNMTVPEDDNISNDSNDFTEVENGQINSKFISDRESRRSLTNSHLEKKKCDEYIPGTTSLGMSVF

SEQ ID NO: 35940 - protein, 503 aa, Homo sapiens; identical to SEQ ID NO: 35938
  REGION 1..503: note = ENSP00000478907

SEQ ID NO: 35941 - protein, 1119 aa, Homo sapiens
  REGION 1..1119: note = ENSP00000363891
MTAAAASNWGLITNIVNSIVGVSVLTMPFCFKQCGIVLGALLLVFCSWMTHQSCMFLVKSASLSKRRTYAGLAFHAYGKAGKMLVETSMIGLMLGTCIAFYVVIGDLGSNFFARLFGFQVGGTFRMFLLFAVSLCIVLPLSLQRNMMASIQSFSAMALLFYTVFMFVIVLSSLKHGLFSGQWLRRVSYVRWEGVFRCIPIFGMSFACQSQVLPTYDSLDEPSVKTMSSIFASSLNVVTTFYVMVGFFGYVSFTEATAGNVLMHFPSNLVTEMLRVGFMMSVAVGFPMMILPCRQALSTLLCEQQQKDGTFAAGGYMPPLRFKALTLSVVFGTMVGGILIPNVETILGLTGATMGSLICFICPALIYKKIHKNALSSQVVLWVGLGVLVVSTVTTLSVSEEVPEDLAEEAPGGRLGEAEGLMKVEAARLSAQDPVVAVAEDGREKPKLPKEREELEQAQIKGPVDVPGREDGKEAPEEAQLDRPGQGIAVPVGEAHRHEPPVPHDKVVVDEGQDREVPEENKPPSRHAGGKAPGVQGQMAPPLPDSEREKQEPEQGEVGKRPGQAQALEEAGDLPEDPQKVPEADGQPAVQPAKEDLGPGDRGLHPRPQAVLSEQQNGLAVGGGEKAKGGPPPGNAAGDTGQPAEDSDHGGKPPLPAEKPAPGPGLPPEPREQRDVERAGGNQAASQLEEAGRAEMLDHAVLLQVIKEQQVQQKRLLDQQEKLLAVIEEQHKEIHQQRQEDEEDKPRQVEVHQEPGAAVPRGQEAPEGKARETVENLPPLPLDPVLRAPGGRPAPSQDLNQRSLEHSEGPVGRDPAGPPDGGPDTEPRAAQAKLRDGQKDAAPRAAGTVKELPKGPEQVPVPDPAREAGGPEERLAEEFPGQSQDVTGGSQDRKKPGKEVAATGTSILKEANWLVAGPGAETGDPRMKPKQVSRDLGLAADLPGGAEGAAAQPQAVLRQPELRVISDGEQGGQQGHRLDHGGHLEMRKARGGDHVPVSHEQPRGGEDAAVQEPRQRPEPELGLKRAVPGGQRPDNAKPNRDLKLQAGSDLRRRRRDLGPHAEGQLAPRDGVIIGLNPLPDVQVNDLRGALDAQLRQAAGGALQVVHSRQLRQAPGPPEES

SEQ ID NO: 35942 - protein, 298 aa, Homo sapiens
  REGION 1..298: note = ENSP00000437601
GEKAKGGPPPGNAAGDTGQPAEDSDHGGKPPLPAEKPAPGPGLPPEPREQRDVERAGGNQAASQLEAEIKKIVAEAGRAEMLDHAVLLQVIKEQQVQQKRLLDQQEKLLAVIEEQHKEIHQQRQEDEEDKPRQVEVHQEPGAAVPRGQEAPEGKARETVENLPPLPLDPVLRAPGGRPAPSQDLNQRSLEHSEGPVGRDPAGPPDGGPDTEPRAAQAKLRDGQKDAAPRAAGTVKELPKGPEQVPVPDPAREAGGPEERLAEEFPGQSQDVTGGSQDRKKPGKEVAATGTSILKEANW

SEQ ID NO: 35943 - protein, 258 aa, Homo sapiens
  REGION 1..258: note = ENSP00000458273
  VARIANT 1: note = Any amino acid
XEKAKGGPPPGNAAGDTGQPAEDSDHGGKPPLPAEKPAPGPGLPPEPREQRDVERAGGNQAASQLEAGRAEMLDHAVLLQVIKEQQVQQKRLLDQQEKLLAVIEEQHKEIHQQRQEDEEDKPRQVEVHQEPGAAVPRGQEAPEGKARETVENLPPLPLDPVLRAPGGRPAPSQDLNQRSLEHSEGPVGRDPAGPPDGGPDTEPRAAQAKLRDGQKDAAPRAAGTVKELPKGPEQVPVPDPAREAGGPEERLAEEFPGQ

SEQ ID NO: 35944 - protein, 780 aa, Homo sapiens
  REGION 1..780: note = ENSP00000288439
MTAAAASNWGLITNIVNSIVGVSVLTMPFCFKQCGIVLGALLLVFCSWMTHQSCMFLVKSASLSKRRTYAGLAFHAYGKAGKMLVETSMIGLMLGTCIAFYVVIGDLGSNFFARLFGFQVGGTFRMFLLFAVSLCIVLPLSLQRNMMASIQSFSAMALLFYTVFMFVIVLSSLKHGLFSGQWLRRVSYVRWEGVFRCIPIFGMSFACQSQVLPTYDSLDEPSVKTMSSIFASSLNVVTTFYVMVGFFGYVSFTEATAGNVLMHFPSNLVTEMLRVGFMMSVAVGFPMMILPCRQALSTLLCEQQQKDGTFAAGGYMPPLRFKALTLSVVFGTMVGGILIPNVETILGLTGATMGSLICFICPALIYKKIHKNALSSQVVLWVGLGVLVVSTVTTLSVSEEVPEDLAEEAPGGRLGEAEGLMKVEAARLSAQDPVVAVAEDGREKPKLPKEREELEQAQIKGPVDVPGREDGKEAPEEAQLDRPGQGIAVPVGEAHRHEPPVPHDKVVVDEGQDREVPEENKPPSRHAGGKAPGVQGQMAPPLPDSEREKQEPEQGEVGKRPGQAQALEEAGDLPEDPQKVPEADGQPAVQPAKEDLGPGDRGLHPRPQAVLSEQQNGLAVGGGEKAKGGPPPGNAAGDTGQPAEDSDHGGKPPLPAEKPAPGPGLPPEPREQRDVERAGGNQAASQLEGKASALQPPASGPGSGSPLPQPWGDAQVILGSPARPPFSFQPPAEQTPRRAFCSLPISSLLSGNLLSALLPFKHLRHRHMACDYRFISLAPL

SEQ ID NO: 35945 - protein, 70 aa, Homo sapiens
  REGION 1..70: note = ENSP00000444523
  VARIANT 1: note = Any amino acid
XQRNMMASIQSFSAMALLFYTVFMFVIVLSSLKHGLFSGQWLRRVSYVRWEGVFRCIPIFGMSFACQSAL

SEQ ID NO: 35946 - protein, 119 aa, Homo sapiens
  REGION 1..119: note = ENSP00000439115
MTHQSCMFLVKSASLSKRRTYAGLAFHAYGKAGKMLVETSMIGLMLGTCIAFYVVIGDLGSNFFARLFGFQVGGTFRMFLLFAVSLCIVLPLSLQRNMMASIQSFSAMALLFYTVFMFV

SEQ ID NO: 35947 - protein, 472 aa, Homo sapiens
  REGION 1..472: note = ENSP00000471683
MELQDPKMNGALPSDAVGYRQEREGFLPSRGPAPGSKPVQFMDFEGKTSFGMSVFNLSNAIMGSGILGLAYAMAHTGVIFFLALLLCIALLSSYSIHLLLTCAGIAGIRAYEQLGQRAFGPAGKVVVATVICLHNVGAMSSYLFIIKSELPLVIGTFLYMDPEGDWFLKGNLLIIIVSVLIILPLALMKHLGYLGYTSGLSLTCMLFFLVSVIYKKFQLGCAIGHNETAMESEALVGLPSQGLNSSCEAQMFTVDSQMSYTVPIMAFAFVCHPEVLPIYTELCRPSKRRMQAVANVSIGAMFCMYGLTATFGYLTFYSSVKAEMLHMYSQKDPLILCVRLAVLLAVTLTVPVVLFPIRRALQQLLFPGKAFSWPRHVAIALILLVLVNVLVICVPTIRDIFGVIGSTSAPSLIFILPSIFYLRIVPSEVEPFLSWPKIQALCFGVLGVLFMAVSLGFMFANWATGQSRMSGH

SEQ ID NO: 35948 - protein, 421 aa, Homo sapiens
  REGION 1..421: note = ENSP00000478807
MSVFNLSNAIMGSGILGLAYAMAHTGVIFFLALLLCIALLSSYSIHLLLTCAGIAGIRAYEQLGQRAFGPAGKVVVATVICLHNVGAMSSYLFIIKSELPLVIGTFLYMDPEGDWFLKGNLLIIIVSVLIILPLALMKHLGYLGYTSGLSLTCMLFFLVSVIYKKFQLGCAIGHNETAMESEALVGLPSQGLNSSCEAQMFTVDSQMSYTVPIMAFAFVCHPEVLPIYTELCRPSKRRMQAVANVSIGAMFCMYGLTATFGYLTFYSSVKAEMLHMYSQKDPLILCVRLAVLLAVTLTVPVVLFPIRRALQQLLFPGKAFSWPRHVAIALILLVLVNVLVICVPTIRDIFGVIGSTSAPSLIFILPSIFYLRIVPSEVEPFLSWPKIQALCFGVLGVLFMAVSLGFMFANWATGQSRMSGH

SEQ ID NO: 35949 - protein, 29 aa, Homo sapiens
  REGION 1..29: note = ENSP00000482638
  VARIANT 1: note = Any amino acid
XALLLCIALLSSYSIHLLLTCAGIAGTGS

SEQ ID NO: 35950 - protein, 279 aa, Homo sapiens
  REGION 1..279: note = ENSP00000402988
MELQDPKMNGALPSDAVGYRQEREGFLPSRGPAPGSKPVQFMDFEGKTSFGMSVFNLSNAIMGSGILGLAYAMAHTGVIFFLALLLCIALLSSYSIHLLLTCAGIAGIRAYEQLGQRAFGPAGKVVVATVICLHNVGAMSSYLFIIKSELPLVIGTFLYMDPEGDWFLKGNLLIIIVSVLIILPLALMKHLGYLGYTSGLSLTCMLFFLVSVIYKKFQLGCAIGHNETAMESEALVGLPSQGLNSSCEAQMFTVDSQMSYTVPIMAFAFVCHPEVLPIY

SEQ ID NO: 35951 - protein, 272 aa, Homo sapiens
  REGION 1..272: note = ENSP00000407258
MELQDPKMNGALPSDAVGYRQEREGFLPSRGPAPGSKPVQFMDFEGKTSFGMSVFNLSNAIMGSGILGLAYAMAHTGVIFFLALLLCIALLSSYSIHLLLTCAGIAGIRAYEQLGQRAFGPAGKVVVATVICLHNVGAMSSYLFIIKSELPLVIGTFLYMDPEGDWFLKGNLLIIIVSVLIILPLALMKHLGYLGYTSGLSLTCMLFFLVSVIYKKFQLGCAIGHNETAMESEALVGLPSQGLNSSCEAQMFTVDSQMSYTVPIMAFAFVCH

SEQ ID NO: 35952 - protein, 218 aa, Homo sapiens
  REGION 1..218: note = ENSP00000403976
MELQDPKMNGALPSDAVGYRQEREGFLPSRGPAPGSKPVQFMDFEGKTSFGMSVFNLSNAIMGSGILGLAYAMAHTGVIFFLALLLCIALLSSYSIHLLLTCAGIAGIRAYEQLGQRAFGPAGKVVVATVICLHNVGAMSSYLFIIKSELPLVIGTFLYMDPEGDWFLKGNLLIIIVSVLIILPLALMKHLGYLGYTSGLSLTCMLFFLVSVIYKKFQ

SEQ ID NO: 35953 - protein, 191 aa, Homo sapiens
  REGION 1..191: note = ENSP00000389644
MELQDPKMNGALPSDAVGYRQEREGFLPSRGPAPGSKPVQFMDFEGKTSFGMSVFNLSNAIMGSGILGLAYAMAHTGVIFFLALLLCIALLSSYSIHLLLTCAGIAGIRAYEQLGQRAFGPAGKVVVATVICLHNVGAMSSYLFIIKSELPLVIGTFLYMDPEGDWFLKGNLLIIIVSVLIILPLALMKHL

SEQ ID NO: 35954 - protein, 163 aa, Homo sapiens
  REGION 1..163: note = ENSP00000483716
MELQDPKMNGALPSDAVGYRQEREGFLPSRGPAPGSKPVQFMDFEGKTSFGMSVFNLSNAIMGSGILGLAYAMAHTGVIFFLALLLCIALLSSYSIHLLLTCAGIAGIRAYEQLGQRAFGPAGKVVVATVICLHNVGAMSSYLFIIKSELPLVIGTFLYMDPE

SEQ ID NO: 35955 - protein, 163 aa, Homo sapiens; identical to SEQ ID NO: 35954
  REGION 1..163: note = ENSP00000416948

SEQ ID NO: 35956 - protein, 472 aa, Homo sapiens; identical to SEQ ID NO: 35947
  REGION 1..472: note = ENSP00000481291

SEQ ID NO: 35957 - protein, 403 aa, Homo sapiens
  REGION 1..403: note = ENSP00000484236
MLGPCPVTCSSSNLSSPWLSAPSCTWTPRGDWFLKGNLLIIIVSVLIILPLALMKHLGYLGYTSGLSLTCMLFFLVSVIYKKFQLGCAIGHNETAMESEALVGLPSQGLNSSCEAQMFTVDSQMSYTVPIMAFAFVCHPEVLPIYTELCRPSKRRMQAVANVSIGAMFCMYGLTATFGYLTFYSSVKAEMLHMYSQKDPLILCVRLAVLLAVTLTVPVVLFPIRRALQQLLFPGKAFSWPRHVAIALILLVLVNVLVICVPTIRDIFGVIGSTSAPSLIFILPSIFYLRIVPSEVEPFLSWPKIQALCFGVLGVLFMAVSLGFMFANWATGRAACLDTDQALLAQVPVRMHMEGSGPLPRVPPAQHVEVAGSHERGCQRRGTAEAADWPTSLLPRDAKLGSWP

SEQ ID NO: 35958 - protein, 462 aa, Homo sapiens
  REGION 1..462: note = ENSP00000454646
MAQVSINNDYSEWDLSTDAGERARLLQSPCVDTAPKSEWEASPGGLDRGTTSTLGAIFIVVNACLGAGLLNFPAAFSTAGGVAAGIALQMGMLVFIISGLVILAYCSQASNERTYQEVVWAVCGKLTGVLCEVAIAVYTFGTCIAFLIIIGDQQDKIIAVMAKEPEGASGPWYTDRKFTISLTAFLFILPLSIPREIGFQKYASFLSVVGTWYVTAIVIIKYIWPDKEMTPGNILTRPASWMAVFNAMPTICFGFQCHVSSVPVFNSMQQPEVKTWGGVVTAAMVIALAVYMGTGICGFLTFGAAVDPDVLLSYPSEDMAVAVARAFIILSVLTSYPILHFCGRAVVEGLWLRYQGVPVEEDVGRERRRRVLQTLVWFLLTLLLALFIPDIGKVISVIGGLAACFIFVFPGLCLIQAKLSEMEEVKPASWWVLVSYGVLLVTLGAFIFGQTTANAIFVDLLA

SEQ ID NO: 35959 - protein, 462 aa, Homo sapiens; identical to SEQ ID NO: 35958
  REGION 1..462: note = ENSP00000219320

SEQ ID NO: 35960 - protein, 354 aa, Homo sapiens
  REGION 1..354: note = ENSP00000454325
MAQVSINNDYSEWDLSTDAGERARLLQSPCVDTAPKSEWEASPGGLDRGTTSTLGAIFIVVNACLGAGLLNFPAAFSTAGGVAAGIALQMGMLVFIISGLVILAYCSQASNERTYQEVVWAVCGKLTGVLCEVAIAVYTFGTCIAFLIIIGDQQDKIIAVMAKEPEGASGPWYTDRKFTISLTAFLFILPLSIPREIGFQKYASFLSVVGTWYVTAIVIIKYIWPDKEMTPGNILTRPASWMAVFNAMPTICFGFQCHVSSVPVFNSMQQPEVKTWGGVVTAAMVIALAVYMGTAGGCWSATESSWSPWEPSSSARPQPTPSLWISWHNHCLPGNTRPLPLVAGTHLLELWGHS

SEQ ID NO: 35961 - protein, 260 aa, Homo sapiens
  REGION 1..260: note = ENSP00000455119
MAQVSINNDYSEWDLSTDAGERARLLQSPCVDTAPKSEWEASPGGLDRGTTSTLGAIFIVVNACLGAGLLNFPAAFSTAGGVAAGIALQMGMLVFIISGLVILAYCSQASNERTYQEVVWAVCGKLTGVLCEVAIAVYTFGTCIAFLIIIGDQQDKIIAVMAKEPEGASGPWYTDRKFTISLTAFLFILPLSIPREIGFQKYASFLSVVGTWYVTAIVIIKYIWPDKEMTPGNILTRPASWMAVFNAMPTICFGFQHAAA

SEQ ID NO: 35962 - protein, 373 aa, Homo sapiens
  REGION 1..373: note = ENSP00000455362
MGMLVFIISGLVILAYCSQASNERTYQEVVWAVCGKLTGVLCEVAIAVYTFGTCIAFLIIIGDQQDKIIAVMAKEPEGASGPWYTDRKFTISLTAFLFILPLSIPREIGFQKYASFLSVVGTWYVTAIVIIKYIWPDKEMTPGNILTRPASWMAVFNAMPTICFGFQCHVSSVPVFNSMQQPEVKTWGGVVTAAMVIALAVYMGTGICGFLTFGAAVDPDVLLSYPSEDMAVAVARAFIILSVLTSYPILHFCGRAVVEGLWLRYQGVPVEEDVGRERRRRVLQTLVWFLLTLLLALFIPDIGKVISVIGGLAACFIFVFPGLCLIQAKLSEMEEVKPASWWVLVSYGVLLVTLGAFIFGQTTANAIFVDLLA

SEQ ID NO: 35963 - protein, 170 aa, Homo sapiens
  REGION 1..170: note = ENSP00000457988
  VARIANT 1: note = Any amino acid
XIAVYTFGTCIAFLIIIGDQQDKIIAVMAKEPEGASGPWYTDRKFTISLTAFLFILPLSIPREIGFQKYASFLSVVGTWYVTAIVIIKYIWPDKEMTPGNILTRPASWMAVFNAMPTICFGFQCHVSSVPVFNSMQQPEVKTWGGVVTAAMVIALAVYMGTAETRSHYVA

SEQ ID NO: 35964 - protein, 65 aa, Homo sapiens
  REGION 1..65: note = ENSP00000456464
MTPGNILTRPASWMAVFNAMPTICFGFQCHVSSVPVFNSMQQPEVKTWGGVVTAAMVIALAVYMG

SEQ ID NO: 35965 - protein, 140 aa, Homo sapiens
  REGION 1..140: note = ENSP00000455490
MAQVSINNDYSEWDLSTDAGERARLLQSPCVDTAPKSEWEASPGGLDRGTTSTLGAIFIVVNACLGAGLLNFPAAFSTAGGVAAGIALQMGMLVFIISGLVILAYCSQASNERTYQEVVWAVCGKLTGVLCEVAIAVYTF

SEQ ID NO: 35966 - protein, 94 aa, Homo sapiens
  REGION 1..94: note = ENSP00000454734
MAQVSINNDYSEWDLSTDAGERARLLQSPCVDTAPKSEWEASPGGLDRGTTSTLGAIFIVVNACLGAGLLNFPAAFSTAGGVAAGIALQMGMLV

SEQ ID NO: 35967 - protein, 135 aa, Homo sapiens
  REGION 1..135: note = ENSP00000457462
MAQVSINNDYSEWDLSTDAGERARLLQSPCVDTAPKSEWEASPGGLDRGTTSTLGAIFIVVNACLGAGLLNFPAAFSTAGGVAAGIALQMVSALAGRAEVQFSWALCLKREASGQGWPVSDTRTALPSLTHGRHD

SEQ ID NO: 35968 - protein, 654 aa, Homo sapiens
  REGION 1..654: note = ENSP00000366591
MCFRTKLSVSWVPLFLLLSRVFSTETDKPSAQDSRSRGSSGQPADLLQVLSAGDHPPHNHSRSLIKTLLEKTGCPRRRNGMQGDCNLCFEPDALLLIAGGNFEDQLREEVVQRVSLLLLYYIIHQEEICSSKLNMSNKEYKFYLHSLLSLRQDEDSSFLSQNETEDILAFTRQYFDTSQSQCMETKTLQKKSGIVSSEGANESTLPQLAAMIITLSLQGVCLGQGNLPSPDYFTEYIFSSLNRTNTLRLSELDQLLNTLWTRSTCIKNEKIHQFQRKQNNIITHDQDYSNFSSSMEKESEDGPVSWDQTCFSARQLVEIFLQKGLSLISKEDFKQMSPGIIQQLLSCSCHLPKDQQAKLPPTTLEKYGYSTVAVTLLTLGSMLGTALVLFHSCEENYRLILQLFVGLAVGTLSGDALLHLIPQVLGLHKQEAPEFGHFHESKGHIWKLMGLIGGIHGFFLIEKCFILLVSPNDKKSPEDSQAAEMPIGSMTASNRKCKAISLLAIMILVGDSLHNFADGLAIGAAFSSSSESGVTTTIAILCHEIPHEMGDFAVLLSSGLSMKTAILMNFISSLTAFMGLYIGLSVSADPCVQDWIFTVTAGMFLYLSLVEMLPEMTHVQTQRPWMMFLLQNFGLILGWLSLLLLAIYEQNIKI

SEQ ID NO: 35969 - protein, 690 aa, Homo sapiens
  REGION 1..690: note = ENSP00000366588
MCFRTKLSVSWVPLFLLLSRVFSTETDKPSAQDSRSRGSSGQPADLLQVLSAGDHPPHNHSRSLIKTLLEKTGCPRRRNGMQGDCNLCFEPDALLLIAGGNFEDQLREEVVQRVSLLLLYYIIHQEEICSSKLNMSNKEYKFYLHSLLSLRQDEDSSFLSQNETEDILAFTRQYFDTSQSQCMETKTLQKKSGIVSSEGANESTLPQLAAMIITLSLQGVCLGQGNLPSPDYFTEYIFSSLNRTNTLRLSELDQLLNTLWTRSTCIKNEKIHQFQRKQNNIITHDQDYSNFSSSMEKESEDGPVSWDQTCFSARQLVEIFLQKGLSLISKEDFKQMSPGIIQQLLSCSCHLPKDQQAKLPPTTLEKYGYSTVAVTLLTLGSMLGTALVLFHSCEENYRLILQLFVGLAVGTLSGDALLHLIPQVLGLHKQEAPEFGHFHESKGHIWKLMGLIGGIHGFFLIEKCFILLVSPNDKGLSLVNGHVGHSHHLALNSELSDQAGRGKSASTIQLKSPEDSQAAEMPIGSMTASNRKCKAISLLAIMILVGDSLHNFADGLAIGAAFSSSSESGVTTTIAILCHEIPHEMGDFAVLLSSGLSMKTAILMNFISSLTAFMGLYIGLSVSADPCVQDWIFTVTAGMFLYLSLVEMLPEMTHVQTQRPWMMFLLQNFGLILGWLSLLLLAIYEQNIKI

SEQ ID NO: 35970 - protein, 557 aa, Homo sapiens
  REGION 1..557: note = ENSP00000440445
MSNKEYKFYLHSLLSLRQDEDSSFLSQNETEDILAFTRQYFDTSQSQCMETKTLQKKSGIVSSEGANESTLPQLAAMIITLSLQGVCLGQGNLPSPDYFTEYIFSSLNRTNTLRLSELDQLLNTLWTRSTCIKNEKIHQFQRKQNNIITHDQDYSNFSSSMEKESEDGPVSWDQTCFSARQLVEIFLQKGLSLISKEDFKQMSPGIIQQLLSCSCHLPKDQQAKLPPTTLEKYGYSTVAVTLLTLGSMLGTALVLFHSCEENYRLILQLFVGLAVGTLSGDALLHLIPQVLGLHKQEAPEFGHFHESKGHIWKLMGLIGGIHGFFLIEKCFILLVSPNDKQGLSLVNGHVGHSHHLALNSELSDQAGRGKSASTIQLKSPEDSQAAEMPIGSMTASNRKCKAISLLAIMILVGDSLHNFADGLAIGAAFSSSSESGVTTTIAILCHEIPHEMGDFAVLLSSGLSMKTAILMNFISSLTAFMGLYIGLSVSADPCVQDWIFTVTAGMFLYLSLVEMLPEMTHVQTQRPWMMFLLQNFGLILGWLSLLLLAIYEQNIKI

SEQ ID NO: 35971 - protein, 691 aa, Homo sapiens
  REGION 1..691: note = ENSP00000366586
MCFRTKLSVSWVPLFLLLSRVFSTETDKPSAQDSRSRGSSGQPADLLQVLSAGDHPPHNHSRSLIKTLLEKTGCPRRRNGMQGDCNLCFEPDALLLIAGGNFEDQLREEVVQRVSLLLLYYIIHQEEICSSKLNMSNKEYKFYLHSLLSLRQDEDSSFLSQNETEDILAFTRQYFDTSQSQCMETKTLQKKSGIVSSEGANESTLPQLAAMIITLSLQGVCLGQGNLPSPDYFTEYIFSSLNRTNTLRLSELDQLLNTLWTRSTCIKNEKIHQFQRKQNNIITHDQDYSNFSSSMEKESEDGPVSWDQTCFSARQLVEIFLQKGLSLISKEDFKQMSPGIIQQLLSCSCHLPKDQQAKLPPTTLEKYGYSTVAVTLLTLGSMLGTALVLFHSCEENYRLILQLFVGLAVGTLSGDALLHLIPQVLGLHKQEAPEFGHFHESKGHIWKLMGLIGGIHGFFLIEKCFILLVSPNDKQGLSLVNGHVGHSHHLALNSELSDQAGRGKSASTIQLKSPEDSQAAEMPIGSMTASNRKCKAISLLAIMILVGDSLHNFADGLAIGAAFSSSSESGVTTTIAILCHEIPHEMGDFAVLLSSGLSMKTAILMNFISSLTAFMGLYIGLSVSADPCVQDWIFTVTAGMFLYLSLVEMLPEMTHVQTQRPWMMFLLQNFGLILGWLSLLLLAIYEQNIKI

SEQ ID NO: 35972 - protein, 513 aa, Homo sapiens
  REGION 1..513: note = ENSP00000356105
MSSKPEPKDVHQLNGTGPSASPCSSDGPGREPLAGTSEFLGPDGAGVEVVIESRANAKGVREEDALLENGSQSNESDDVSTDRGPAPPSPLKETSFSIGLQVLFPFLLAGFGTVAAGMVLDIVQHWEVFQKVTEVFILVPALLGLKGNLEMTLASRLSTAANIGHMDTPKELWRMITGNMALIQVQATVVGFLASIAAVVFGWIPDGHFSIPHAFLLCASSVATAFIASLVLGMIMIGVIIGSRKIGINPDNVATPIAASLGDLITLALLSGISWGLYLELNHWRYIYPLVCAFFVALLPVWVVLARRSPATREVLYSGWEPVIIAMAISSVGGLILDKTVSDPNFAGMAVFTPVINGVGGNLVAVQASRISTFLHMNGMPGENSEQAPRRCPSPCTTFFSPDVNSRSARVLFLLVVPGHLVFLYTISCMQGGHTTLTLIFIIFYMTAALLQVLILLYIADWMVHWMWGRGLDPDNFSIPYLTALGDLLGTGLLALSFHVLWLIGDRDTDVGD

SEQ ID NO: 35973 - protein, 569 aa, Homo sapiens
  REGION 1..569: note = ENSP00000488355
MAPTLATAHRRRWWMACTAVLENLLFSAVLLGWGSLLIMLKSEGFYSYLCTEPENVTNGTVGGTAEPGHEEVSWMNGWLSCQAQDEMLNLAFTVGSFLLSAITLPLGIVMDKYGPRKLRLLGSACFAVSCLLIAYGASKPNALSVLIFIALALNGFGGMCMTFTSLTLPNMFGDLRSTFIALMIGSYASSAVTFPGIKLIYDAGVSFIVVLVVWAGCSGLVFLNCFFNWPLEPFPGPEDMDYSVKIKFSWLGFDHKITGKQFYKQVTTVGRRLSVGSSMRSAKEQVALQEGHKLCLSTVDLEVKCQPDAAVAPSFMHSVFSPILLLSLVTMCVTQLRLIFYMGAMNNILKFLVSGDQKTVGLYTSIFGVLQLLCLLTAPVIGYIMDWRLKECEDASEEPEEKDANQGEKKKKKRDRQIQKITNAMRAFAFTNLLLVGFGVTCLIPNLPLQILSFILHTIVRGFIHSAVGGLYAAVYPSTQFGSLTGLQSLISALFALLQQPLFLAMMGPLQGDPLWVNVGLLLLSLLGFCLPLYLICYRRQLERQLQQRQEDDKLFLKINGSSNQEAFV

SEQ ID NO: 35974 - protein, 573 aa, Homo sapiens
  REGION 1..573: note = ENSP00000483848
MAPTLATAHRRRWWMACTAVLENLLFSAVLLGWGSLLIMLKSEGFYSYLCTEPENVTNGTVGGTAEPGHEEVSWMNGWLSCQAQDEMLNLAFTVGSFLLSAITLPLGIVMDKYGPRKLRLLGSACFAVSCLLIAYGASKPNALSVLIFIALALNGFGGMCMTFTSLTLPNMFGDLRSTFIALMIGSYASSAVTFPGIKLIYDAGVSFIVVLVVWAGCSGLVFLNCFFNWPLEPFPGPEDMDYSVKIKFSWLGFDHKITGKQFYKQVTTVGRRLSVGSSMRSAKEQVALQEGHKLCLSTVDLEVKCQPDAAVAPSFMHSVFSPILLLSLVTMCVTQLRLIFYMGAMNNILKFLVSGDQKTVMATVGLYTSIFGVLQLLCLLTAPVIGYIMDWRLKECEDASEEPEEKDANQGEKKKKKRDRQIQKITNAMRAFAFTNLLLVGFGVTCLIPNLPLQILSFILHTIVRGFIHSAVGGLYAAVYPSTQFGSLTGLQSLISALFALLQQPLFLAMMGPLQGDPLWVNVGLLLLSLLGFCLPLYLICYRRQLERQLQQRQEDDKLFLKINGSSNQEAFV

SEQ ID NO: 35975 - protein, 432 aa, Homo sapiens
  REGION 1..432: note = ENSP00000371582
MTYGSPQANASPSDAVALDHGEVSRRQQQELPNMFGDLRSTFIALMIGSYASSAVTFPGIKLIYDAGVSFIVVLVVWAGCSGLVFLNCFFNWPLEPFPGPEDMDYSVKIKFSWLGFDHKITGKQFYKQVTTVGRRLSVGSSMRSAKEQVALQEGHKLCLSTVDLEVKCQPDAAVAPSFMHSVFSPILLLSLVTMCVTQLRLIFYMGAMNNILKFLVSGDQKTVGLYTSIFGVLQLLCLLTAPVIGYIMDWRLKECEDASEEPEEKDANQGEKKKKKRDRQIQKITNAMRAFAFTNLLLVGFGVTCLIPNLPLQILSFILHTIVRGFIHSAVGGLYAAVYPSTQFGSLTGLQSLISALFALLQQPLFLAMMGPLQGDPLWVNVGLLLLSLLGFCLPLYLICYRRQLERQLQQRQEDDKLFLKINGSSNQEAFV

SEQ ID NO: 35976 - protein, 62 aa, Homo sapiens
  REGION 1..62: note = ENSP00000488706
MAPTLATAHRRRWWMACTAVLENLLFSAVLLGWGSLLIMLKSEGFYSYLCTEPAPASRFPAC

SEQ ID NO: 35977 - protein, 56 aa, Homo sapiens
  REGION 1..56: note = ENSP00000487944
MTYGSPQANASPSDAVALDHGEVSRRQQQESCGSCQRTLPSLAMPRSSLTRRFSLL

SEQ ID NO: 35978 - protein, 109 aa, Homo sapiens
  REGION 1..109: note = ENSP00000487841
MAPTLATAHRRRWWMACTAVLENLLFSAVLLGWGSLLIMLKSEGFYSYLCTEPENVTNGTVGGTAEPGHEECHHPAPGYRHGQVWPEEAQAAGQRLLRGFLLADCVRSK

SEQ ID NO: 35979 - protein, 573 aa, Homo sapiens; identical to SEQ ID NO: 35974
  REGION 1..573: note = ENSP00000484291

SEQ ID NO: 35980 - protein, 569 aa, Homo sapiens; identical to SEQ ID NO: 35973
  REGION 1..569: note = ENSP00000301335

SEQ ID NO: 35981 - protein, 573 aa, Homo sapiens; identical to SEQ ID NO: 35974
  REGION 1..573: note = ENSP00000461382

SEQ ID NO: 35982 - protein, 432 aa, Homo sapiens; identical to SEQ ID NO: 35975
  REGION 1..432: note = ENSP00000408284

SEQ ID NO: 35983 - protein, 62 aa, Homo sapiens; identical to SEQ ID NO: 35976
  REGION 1..62: note = ENSP00000461298

SEQ ID NO: 35984 - protein, 56 aa, Homo sapiens; identical to SEQ ID NO: 35977
  REGION 1..56: note = ENSP00000460388

SEQ ID NO: 35985 - protein, 109 aa, Homo sapiens; identical to SEQ ID NO: 35978
  REGION 1..109: note = ENSP00000461553

SEQ ID NO: 35986 - protein, 491 aa, Homo sapiens
  REGION 1..491: note = ENSP00000378555
MAGQGLPLHVATLLTGLLECLGFAGVLFGWPSLVFVFKNEDYFKDLCGPDAGPIGNATGQADCKAQDERFSLIFTLGSFMNNFMTFPTGYIFDRFKTTVARLIAIFFYTTATLIIAFTSAGSAVLLFLAMPMLTIGGILFLITNLQIGNLFGQHRSTIITLYNGAFDSSSAVFLIIKLLYEKGISLRASFIFISVCSTWHVARTFLLMPRGHIPYPLPPNYSYGLCPGNGTTKEEKETAEHENRELQSKEFLSAKEETPGAGQKQELRSFWSYAFSRRFAWHLVWLSVIQLWHYLFIGTLNSLLTNMAGGDMARVSTYTNAFAFTQFGVLCAPWNGLLMDRLKQKYQKEARKTGSSTLAVALCSTVPSLALTSLLCLGFALCASVPILPLQYLTFILQVISRSFLYGSNAAFLTLAFPSEHFGKLFGLVMALSAVVSLLQFPIFTLIKGSLQNDPFYVNVMFMLAILLTFFHPFLVYRECRTWKESPSAIA

SEQ ID NO: 35987 - protein, 491 aa, Homo sapiens; identical to SEQ ID NO: 35986
  REGION 1..491: note = ENSP00000378556

SEQ ID NO: 35988 - protein, 491 aa, Homo sapiens; identical to SEQ ID NO: 35986
  REGION 1..491: note = ENSP00000337561

SEQ ID NO: 35989 - protein, 491 aa, Homo sapiens; identical to SEQ ID NO: 35986
  REGION 1..491: note = ENSP00000436254

SEQ ID NO: 35990 - protein, 137 aa, Homo sapiens
  REGION 1..137: note = ENSP00000433078
  VARIANT 1: note = Any amino acid
XTTKEEKETAEHENRELQSKEFLSAKEETPGAGQKQELRSFWSYAFSRRFAWHLVWLSVIQLWHYLFIGTLNSLLTNMAGGDMARVSTYTNAFAFTQFGVLCAPWNGLLMDRLKQKYQKEARKTVSLQSTLASSLGW

SEQ ID NO: 35991 - protein, 504 aa, Homo sapiens
  REGION 1..504: note = ENSP00000434515
MAGQGLPLHVATLLTGLLECLGFAGVLFGWPSLVFVFKNEDYFKDLCGPDAGPIGNATGQAGRLGCMGDLFSTPDCKAQDERFSLIFTLGSFMNNFMTFPTGYIFDRFKTTVARLIAIFFYTTATLIIAFTSAGSAVLLFLAMPMLTIGGILFLITNLQIGNLFGQHRSTIITLYNGAFDSSSAVFLIIKLLYEKGISLRASFIFISVCSTWHVARTFLLMPRGHIPYPLPPNYSYGLCPGNGTTKEEKETAEHENRELQSKEFLSAKEETPGAGQKQELRSFWSYAFSRRFAWHLVWLSVIQLWHYLFIGTLNSLLTNMAGGDMARVSTYTNAFAFTQFGVLCAPWNGLLMDRLKQKYQKEARKTGSSTLAVALCSTVPSLALTSLLCLGFALCASVPILPLQYLTFILQVISRSFLYGSNAAFLTLAFPSEHFGKLFGLVMALSAVVSLLQFPIFTLIKGSLQNDPFYVNVMFMLAILLTFFHPFLVYRECRTWKESPSAIA

SEQ ID NO: 35992 - protein, 331 aa, Homo sapiens
  REGION 1..331: note = ENSP00000435893
MAGQGLPLHVATLLTGLLECLGFAGVLFGWPSLVFVFKNEDYFKDLCGPDAGPIGNATGQADCKAQDERFSLIFTLGSFMNNFMTFPTGYIFDRFKTTVARLIAIFFYTTATLIIAFTSAGSAVLLFLAMPMLTIGGILFLITNLQIGNLFGQHRSTIITLYNGAFDSSSAVFLIIKLLYEKGISLRASFIFISVCSTWHVARTFLLMPRGHIPYPLPPNYSYGLCPGNGTTKEEKETAEHENRELQSKEFLSAKEETPGAGQKQELRSFWSYAFSRRFAWHLVWLSVIQLWHYLFIGTLNSLLTNMAGGDMARVSTYTNAFAFTQFGVLC

SEQ ID NO: 35993 - protein, 126 aa, Homo sapiens
  REGION 1..126: note = ENSP00000434293
MGDLFSTPDCKAQDERFSLIFTLGSFMNNFMTFPTGYIFDRFKTTVARLIAIFFYTTATLIIAFTSAGSAVLLFLAMPMLTIGGILFLITNLQIGNLFGQHRSTIITLYNGAFDSSSAVFLIIKLL

SEQ ID NO: 35994 - protein, 169 aa, Homo sapiens
  REGION 1..169: note = ENSP00000436055
MAGQGLPLHVATLLTGLLECLGFAGVLFGWPSLVFVFKNEDYFKDLCGPDAGPIGNATGQADCKAQDERFSLIFTLGSFMNNFMTFPTGYIFDRFKTTVARLIAIFFYTTATLIIAFTSAGSAVLLFLAMPMLTIGGILFLITNLQIGNLFGQHRSTIITLYNGAFDSS

SEQ ID NO: 35995 - protein, 148 aa, Homo sapiens
  REGION 1..148: note = ENSP00000434913
MAGQGLPLHVATLLTGLLECLGFAGVLFGWPSLVFVFKNEDYFKDLCGPDAGPIGNATGQADCKAQDERFSLIFTLGSFMNNFMTFPTGYIFDRFKTTVARLIAIFFYTTATLIIAFTSAGSAVLLFLAMPMLTIGGILFLITNLQIG

SEQ ID NO: 35996 - protein, 133 aa, Homo sapiens
  REGION 1..133: note = ENSP00000435273
MAGQGLPLHVATLLTGLLECLGFAGVLFGWPSLVFVFKNEDYFKDLCGPDAGPIGNATGQAGRLGCMGDLFSTPDCKAQDERFSLIFTLGSFMNNFMTFPTGYIFDRFKTTVARLIAIFFYTTATLIIAFTSA

SEQ ID NO: 35997 - protein, 119 aa, Homo sapiens
  REGION 1..119: note = ENSP00000433974
MAGQGLPLHVATLLTGLLECLGFAGVLFGWPSLVFVFKNEDYFKDLCGPDAGPIGNATGQADCKAQDERFSLIFTLGSFMNNFMTFPTGYIFDRFKTTVARLIAIFFYTTATLIIAFTS

SEQ ID NO: 35998 - protein, 109 aa, Homo sapiens
  REGION 1..109: note = ENSP00000431762
MAGQGLPLHVATLLTGLLECLGFAGVLFGWPSLVFVFKNEDYFKDLCGPDAGPIGNATGQADCKAQDERFSLIFTLGSFMNNFMTFPTGYIFDRFKTTVARLIAIFFYT

SEQ ID NO: 35999 - protein, 107 aa, Homo sapiens
  REGION 1..107: note = ENSP00000435156
MAGQGLPLHVATLLTGLLECLGFAGVLFGWPSLVFVFKNEDYFKDLCGPDAGPIGNATGQADCKAQDERFSLIFTLGSFMNNFMTFPTGYIFDRFKTTVARLIAIFF

SEQ ID NO: 36000 - protein, 101 aa, Homo sapiens
  REGION 1..101: note = ENSP00000434569
MAGQGLPLHVATLLTGLLECLGFAGVLFGWPSLVFVFKNEDYFKDLCGPDAGPIGNATGQADCKAQDERFSLIFTLGSFMNNFMTFPTGYIFDRFKTTVAR

SEQ ID NO: 36001 - protein, 97 aa, Homo sapiens
  REGION 1..97: note = ENSP00000435109
MAGQGLPLHVATLLTGLLECLGFAGVLFGWPSLVFVFKNEDYFKDLCGPDAGPIGNATGQADCKAQDERFSLIFTLGSFMNNFMTFPTGYIFDRFKT

SEQ ID NO: 36002 - protein, 78 aa, Homo sapiens
  REGION 1..78: note = ENSP00000435490
MAGQGLPLHVATLLTGLLECLGFAGVLFGWPSLVFVFKNEDYFKDLCGPDAGPIGNATGQADCKAQDERFSLIFTLGS

SEQ ID NO: 36003 - protein, 82 aa, Homo sapiens
  REGION 1..82: note = ENSP00000431367
MAGQGLPLHVATLLTGLLECLGFAGVLFGWPSLVFVFKNEDYFKDLCGPDAGPIGNATGQAGRLGCMGDLFSTPDCKAQDER

SEQ ID NO: 36004 - protein, 63 aa, Homo sapiens
  REGION 1..63: note = ENSP00000434710
MAGQGLPLHVATLLTGLLECLGFAGVLFGWPSLVFVFKNEDYFKDLCGPDAGPIGNATGQAGR

SEQ ID NO: 36005 - protein, 44 aa, Homo sapiens
  REGION 1..44: note = ENSP00000431765
MAGQGLPLHVATLLTGLLECLGFAGVLFGWPSLVFVFKNEDYFK

SEQ ID NO: 36006 - protein, 22 aa, Homo sapiens
  REGION 1..22: note = ENSP00000433393
MAGQGLPLHVATLLTGLLECLG

SEQ ID NO: 36007 - skipped

SEQ ID NO: 36008 - protein, 717 aa, Homo sapiens
  REGION 1..717: note = ENSP00000359896
MNDTEKPADTPSEEEDFGDPRTYDPDFKGPVANRSCTDVLCCMIFLLCIIGYIVLGLVAWVHGDPRRAAYPTDSQGHFCGQKGTPNENKTILFYFNLLRCTSPSVLLNLQCPTTQICVSKCPEKFLTYVEMQLLYTKDKSYWEDYRQFCKTTAKPVKSLTQLLLDDDCPTAIFPSKPFLQRCFPDFSTKNGTLTIGSKMMFQDGNGGTRSVVELGIAANGINKLLDAKSLGLKVFEDYARTWYWILIGLTIAMVLSWIFLILLRFIAGCLFWVFMIGVIGIIGYGIWHCYQQYTNLQERPSSVLTIYDIGIQTNISMYFELQQTWFTFMIILCIIEVIVILMLIFLRNRIRVAIILLKEGSKAIGYVPSTLVYPALTFILLSICICYWVVTAVFLATSGVPVYKVIAPGGHCIHENQTCDPEIFNTTEIAKACPGALCNFAFYGGKSLYHQYIPTFHVYNLFVFLWLINFVIALGQCALAGAFATYYWAMKKPDDIPRYPLFTAFGRAIRYHTGSLAFGSLIIALIQMFKIVLEYLDHRLKRTQNTLSKFLQCCLRCCFWCLENAIKFLNRNAYIMIAIYGRNFCRSAKDAFNLLMRNVLKVAVTDEVTYFVLFLGKLLVAGSIGVLAFLFFTQRLPVIAQGPASLNYYWVPLLTVIFGSYLIAHGFFSVYAMCVETIFICFLEDLERNDGSTARPYYVSQPLLKIFQEENPQTRKQ

SEQ ID NO: 36009 - protein, 719 aa, Homo sapiens
  REGION 1..719: note = ENSP00000359892
MNDTEKPADTPSEEEDFGDPRTYDPDFKGPVANRSCTDVLCCMIFLLCIIGYIVLGLVAWVHGDPRRAAYPTDSQGHFCGQKGTPNENKTILFYFNLLRCTSPSVLLNLQCPTTQICVSKCPEKFLTYVEMQLLYTKDKSYWEDYRQFCKTTAKPVKSLTQLLLDDDCPTAIFPSKPFLQRCFPDFSTKNGTLTIGSKMMFQDGNGGTRSVVELGIAANGINKLLDAKSLGLKVFEDYARTWYWILIGLTIAMVLSWIFLILLRFIAGCLFWVFMIGVIGIIGYGIWHCYQQYTNLQERPSSVLTIYDIGIQTNISMYFELQQTWFTFMIILCIIEVIVILMLIFLRNRIRVAIILLKEGSKAIGYVPSTLVYPALTFILLSICICYWVVTAVFLATSGVPVYKVIAPGGHCIHENQTCDPEIFNTTEIAKACPGALCNFAFYGGKSLYHQYIPTFHVYNLFVFLWLINFVIALGQCALAGAFATYYWAMKKPDDIPRYPLFTAFGRAIRYHTGSLAFGSLIIALIQMFKIVLEYLDHRLKRTQNTLSKFLQCCLRCCFWCLENAIKFLNRNAYIMIAIYGRNFCRSAKDAFNLLMRNVLKVAVTDEVTYFVLFLGKLLVAGSIGVLAFLFFTQRLPVIAQGPASLNYYWVPLLTVIFGSYLIAHGFFSVYAMCVETIFICFCEDLERNDGSTEKPYFVTPNLHGILIKKQLVPQKQKE

SEQ ID NO: 36010 - protein, 782 aa, Homo sapiens
  REGION 1..782: note = ENSP00000418096
MLQQPGPRPGRQQPSGDRDACRLHPQGRPPALPTMIPAASSTPPGDALFPSVAPQDFWRSQVTGYSGSVTRHLSHRANNFKRHPKRRKCIRPSPPPPPNTPCPLELVDFGDLHPQRSFRELLFNGCILFGIEFSYAMETAYVTPVLLQMGLPDQLYSLVWFISPILGFLLQPLLGAWSDRCTSRFGRRRPFILVLAIGALLGLSLLLNGRDIGIALADVTGNHKWGLLLTVCGVVLMDFSADSADNPSHAYMMDVCSPADQDRGLNIHALLAGLGGGFGYVVGGIHWDKTGFGRALGGQLRVIYLFTAVTLSVTTVLTLVSIPERPLRPPSEKRAAMKSPSLPLPPSPPVLPEEGPGDSLPSHTATNFSSPISPPSPLTPKYGSFISRDSSLTGISEFASSFGTANIDSVLIDCFTGGHDSYLAIPGSVPRPPISVSFPRAPDGFYRQDRGLLEGREGALTSGCDGDILRVGSLDTSKPRSSGILKRPQTLAIPDAAGGGGPETSRRRNVTFSQQVANILLNGVKYESELTGSSERAEQPLSVGRLCSTICNMPKALRTLCVNHFLGWLSFEGMLLFYTDFMGEVVFQGDPKAPHTSEAYQKYNSGVTMGCWGMCIYAFSAAFYSAILEKLEEFLSVRTLYFIAYLAFGLGTGLATLSRNLYVVLSLCITYGILFSTLCTLPYSLLCDYYQSKKFAGSSADGTRRGMGVDISLLSCQYFLAQILVSLVLGPLTSAVGSANGVMYFSSLVSFLGCLYSSLFVIYEIPPSDAADEEHRPLLLNV

SEQ ID NO: 36011 - protein, 748 aa, Homo sapiens
  REGION 1..748: note = ENSP00000289877
MIPAASSTPPGDALFPSVAPQDFWRSQVTGYSGSVTRHLSHRANNFKRHPKRRKCIRPSPPPPPNTPCPLELVDFGDLHPQRSFRELLFNGCILFGIEFSYAMETAYVTPVLLQMGLPDQLYSLVWFISPILGFLLQPLLGAWSDRCTSRFGRRRPFILVLAIGALLGLSLLLNGRDIGIALADVTGNHKWGLLLTVCGVVLMDFSADSADNPSHAYMMDVCSPADQDRGLNIHALLAGLGGGFGYVVGGIHWDKTGFGRALGGQLRVIYLFTAVTLSVTTVLTLVSIPERPLRPPSEKRAAMKSPSLPLPPSPPVLPEEGPGDSLPSHTATNFSSPISPPSPLTPKYGSFISRDSSLTGISEFASSFGTANIDSVLIDCFTGGHDSYLAIPGSVPRPPISVSFPRAPDGFYRQDRGLLEGREGALTSGCDGDILRVGSLDTSKPRSSGILKRPQTLAIPDAAGGGGPETSRRRNVTFSQQVANILLNGVKYESELTGSSERAEQPLSVGRLCSTICNMPKALRTLCVNHFLGWLSFEGMLLFYTDFMGEVVFQGDPKAPHTSEAYQKYNSGVTMGCWGMCIYAFSAAFYSAILEKLEEFLSVRTLYFIAYLAFGLGTGLATLSRNLYVVLSLCITYGILFSTLCTLPYSLLCDYYQSKKFAGSSADGTRRGMGVDISLLSCQYFLAQILVSLVLGPLTSAVGSANGVMYFSSLVSFLGCLYSSLFVIYEIPPSDAADEEHRPLLLNV

SEQ ID NO: 36012 - protein, 553 aa, Homo sapiens
  REGION 1..553: note = ENSP00000356113
MVQRLWVSRLLRHRKAQLLLVNLLTFGLEVCLAAGITYVPPLLLEVGVEEKFMTMVLGIGPVLGLVCVPLLGSASDHWRGRYGRRRPFIWALSLGILLSLFLIPRAGWLAGLLCPDPRPLELALLILGVGLLDFCGQVCFTPLEALLSDLFRDPDHCRQAYSVYAFMISLGGCLGYLLPAIDWDTSALAPYLGTQEECLFGLLTLIFLTCVAATLLVAEEAALGPTEPAEGLSAPSLSPHCCPCRARLAFRNLGALLPRLHQLCCRMPRTLRRLFVAELCSWMALMTFTLFYTDFVGEGLYQGVPRAEPGTEARRHYDEGVRMGSLGLFLQCAISLVFSLVMDRLVQRFGTRAVYLASVAAFPVAAGATCLSHSVAVVTASAALTGFTFSALQILPYTLASLYHREKQVFLPKYRGDTGGASSEDSLMTSFLPGPKPGAPFPNGHVGAGGSGLLPPPPALCGASACDVSVRVVVGEPTEARVVPGRGICLDLAILDSAFLLSQVAPSLFMGSIVQLSQSVTAYMVSAAGLGLVAIYFATQVVFDKSDLAKYSA

SEQ ID NO: 36013 - protein, 1079 aa, Homo sapiens
  REGION 1..1079: note = ENSP00000264485
MEDEAVLDRGASFLKHVCDEEEVEGHHTIYIGVHVPKSYRRRRRHKRKTGHKEKKEKERISENYSDKSDIENADESSSSILKPLISPAAERIRFILGEEDDSPAPPQLFTELDELLAVDGQEMEWKETARWIKFEEKVEQGGERWSKPHVATLSLHSLFELRTCMEKGSIMLDREASSLPQLVEMIVDHQIETGLLKPELKDKVTYTLLRKHRHQTKKSNLRSLADIGKTVSSASRMFTNPDNGSPAMTHRNLTSSSLNDISDKPEKDQLKNKFMKKLPRDAEASNVLVGEVDFLDTPFIAFVRLQQAVMLGALTEVPVPTRFLFILLGPKGKAKSYHEIGRAIATLMSDEVFHDIAYKAKDRHDLIAGIDEFLDEVIVLPPGEWDPAIRIEPPKSLPSSDKRKNMYSGGENVQMNGDTPHDGGHGGGGHGDCEELQRTGRFCGGLIKDIKRKAPFFASDFYDALNIQALSAILFIYLATVTNAITFGGLLGDATDNMQGVLESFLGTAVSGAIFCLFAGQPLTILSSTGPVLVFERLLFNFSKDNNFDYLEFRLWIGLWSAFLCLILVATDASFLVQYFTRFTEEGFSSLISFIFIYDAFKKMIKLADYYPINSNFKVGYNTLFSCTCVPPDPANISISNDTTLAPEYLPTMSSTDMYHNTTFDWAFLSKKECSKYGGNLVGNNCNFVPDITLMSFILFLGTYTSSMALKKFKTSPYFPTTARKLISDFAIILSILIFCVIDALVGVDTPKLIVPSEFKPTSPNRGWFVPPFGENPWWVCLAAAIPALLVTILIFMDQQITAVIVNRKEHKLKKGAGYHLDLFWVAILMVICSLMALPWYVAATVISIAHIDSLKMETETSAPGEQPKFLGVREQRVTGTLVFILTGLSVFMAPILKFIPMPVLYGVFLYMGVASLNGVQFMDRLKLLLMPLKHQPDFIYLRHVPLRRVHLFTFLQVLCLALLWILKSTVAAIIFPVMILALVAVRKGMDYLFSQHDLSFLDDVIPEKDKKKKEDEKKKKKKKGSLDSDNDDSDCPYSEKVPSIKIPMDIMEQQPFLSDSKPSDRERSPTFLERHTSC

SEQ ID NO: 36014 - protein, 995 aa, Homo sapiens
  REGION 1..995: note = ENSP00000307349
MEDEAVLDRGASFLKHVCDEEEVEGHHTIYIGVHVPKSYRRRRRHKRKTGHKEKKEKERISENYSDKSDIENADESSSSILKPLISPAAERIRFILGEEDDSPAPPQLFTELDELLAVDGQEMEWKETARWIKFEEKVEQGGERWSKPHVATLSLHSLFELRTCMEKGSIMLDREASSLPQLVEMIVDHQIETGLLKPELKDKVTYTLLRKHRHQTKKSNLRSLADIGKTVSSASRMFTNPDNGSPAMTHRNLTSSSLNDISDKPEKDQLKNKFMKKLPRDAEASNVLVGEVDFLDTPFIAFVRLQQAVMLGALTEVPVPTRFLFILLGPKGKAKSYHEIGRAIATLMSDEVFHDIAYKAKDRHDLIAGIDEFLDEVIVLPPGEWDPAIRIEPPKSLPSSDKRKNMYSGGENVQMNGDTPHDGGHGGGGHGDCEELQRTGRFCGGLIKDIKRKAPFFASDFYDALNIQALSAILFIYLATVTNAITFGGLLGDATDNMQGVLESFLGTAVSGAIFCLFAGQPLTILSSTGPVLVFERLLFNFSKDNNFDYLEFRLWIGLWSAFLCLILVATDASFLVQYFTRFTEEGFSSLISFIFIYDAFKKMIKLADYYPINSNFKVGYNTLFSCTCVPPDPANISISNDTTLAPEYLPTMSSTDMYHNTTFDWAFLSKKECSKYGGNLVGNNCNFVPDITLMSFILFLGTYTSSMALKKFKTSPYFPTTARKLISDFAIILSILIFCVIDALVGVDTPKLIVPSEFKPTSPNRGWFVPPFGENPWWVCLAAAIPALLVTILIFMDQQITAVIVNRKEHKLKFIPMPVLYGVFLYMGVASLNGVQFMDRLKLLLMPLKHQPDFIYLRHVPLRRVHLFTFLQVLCLALLWILKSTVAAIIFPVMILALVAVRKGMDYLFSQHDLSFLDDVIPEKDKKKKEDEKKKKKKKGSLDSDNDDSDCPYSEKVPSIKIPMDIMEQQPFLSDSKPSDRERSPTFLERHTSC

SEQ ID NO: 36015 - protein, 171 aa, Homo sapiens
  REGION 1..171: note = ENSP00000491107
MNNSLQVNLPRSWAAPSGSLQEKSEHSFFLFYYYRMEDEAVLDRGASFLKHVCDEEEVEGHHTIYIGVHVPKSYRRRRRHKRKTGHKEKKEKERISENYSDKSDIENADESSSSILKPLISPAAERIRFILGEEDDSPAPPQLFTELDELLAVDGQEMEWKETARWIKFEE

SEQ ID NO: 36016 - protein, 130 aa, Homo sapiens
  REGION 1..130: note = ENSP00000492496
MQWVFKELSTEAGFPQTIITSTPDTPNFLSWMEDEAVLDRGASFLKHVCDEEEVEGHHTIYIGVHVPKSYRRRRRHKRKTGHKEKKEKERISENYSDKSDIENADESSSSILKPLISPAAERIRFILGEE

SEQ ID NO: 36017 - protein, 646 aa, Homo sapiens
  REGION 1..646: note = ENSP00000422400
MSTENVEGKPSNLGERGRARSSTFLRVVQPMFNHSIFTSAVSPAAERIRFILGEEDDSPAPPQLFTELDELLAVDGQEMEWKETARWIKFEEKVEQGGERWSKPHVATLSLHSLFELRTCMEKGSIMLDREASSLPQLVEMIVDHQIETGLLKPELKDKVTYTLLRKHRHQTKKSNLRSLADIGKTVSSASRMFTNPDNGSPAMTHRNLTSSSLNDISDKPEKDQLKNKFMKKLPRDAEASNVLVGEVDFLDTPFIAFVRLQQAVMLGALTEVPVPTRFLFILLGPKGKAKSYHEIGRAIATLMSDEVFHDIAYKAKDRHDLIAGIDEFLDEVIVLPPGEWDPAIRIEPPKSLPSSDKRKNMYSGGENVQMNGDTPHDGGHGGGGHGDCEELQRTGRFCGGLIKDIKRKAPFFASDFYDALNIQALSAILFIYLATVTNAITFGGLLGDATDNMQGVLESFLGTAVSGAIFCLFAGQPLTILSSTGPVLVFERLLFNFSKDNNFDYLEFRLWIGLWSAFLCLILVATDASFLVQYFTRFTEEGFSSLISFIFIYDAFKKMIKLADYYPINSNFKVGYNTLFSCTCVPPDPGEGITLCVYARFVFGGRCRLHACKFSTCCHGPQELVLFFSLKNSATEFDVSLPEVF

SEQ ID NO: 36018 - protein, 1035 aa, Homo sapiens
  REGION 1..1035: note = ENSP00000344272
MSTENVEGKPSNLGERGRARSSTFLRVVQPMFNHSIFTSAVSPAAERIRFILGEEDDSPAPPQLFTELDELLAVDGQEMEWKETARWIKFEEKVEQGGERWSKPHVATLSLHSLFELRTCMEKGSIMLDREASSLPQLVEMIVDHQIETGLLKPELKDKVTYTLLRKHRHQTKKSNLRSLADIGKTVSSASRMFTNPDNGSPAMTHRNLTSSSLNDISDKPEKDQLKNKFMKKLPRDAEASNVLVGEVDFLDTPFIAFVRLQQAVMLGALTEVPVPTRFLFILLGPKGKAKSYHEIGRAIATLMSDEVFHDIAYKAKDRHDLIAGIDEFLDEVIVLPPGEWDPAIRIEPPKSLPSSDKRKNMYSGGENVQMNGDTPHDGGHGGGGHGDCEELQRTGRFCGGLIKDIKRKAPFFASDFYDALNIQALSAILFIYLATVTNAITFGGLLGDATDNMQGVLESFLGTAVSGAIFCLFAGQPLTILSSTGPVLVFERLLFNFSKDNNFDYLEFRLWIGLWSAFLCLILVATDASFLVQYFTRFTEEGFSSLISFIFIYDAFKKMIKLADYYPINSNFKVGYNTLFSCTCVPPDPANISISNDTTLAPEYLPTMSSTDMYHNTTFDWAFLSKKECSKYGGNLVGNNCNFVPDITLMSFILFLGTYTSSMALKKFKTSPYFPTTARKLISDFAIILSILIFCVIDALVGVDTPKLIVPSEFKPTSPNRGWFVPPFGENPWWVCLAAAIPALLVTILIFMDQQITAVIVNRKEHKLKKGAGYHLDLFWVAILMVICSLMALPWYVAATVISIAHIDSLKMETETSAPGEQPKFLGVREQRVTGTLVFILTGLSVFMAPILKFIPMPVLYGVFLYMGVASLNGVQFMDRLKLLLMPLKHQPDFIYLRHVPLRRVHLFTFLQVLCLALLWILKSTVAAIIFPVMILALVAVRKGMDYLFSQHDLSFLDDVIPEKDKKKKEDEKKKKKKKGSLDSDNDDSDCPYSEKVPSIKIPMDIMEQQPFLSDSKPSDRERSPTFLERHTSC

SEQ ID NO: 36019 - protein, 1094 aa, Homo sapiens
  REGION 1..1094: note = ENSP00000393557
MEDEAVLDRGASFLKHVCDEEEVEGHHTIYIGVHVPKSYRRRRRHKRKTGHKEKKEKERISENYSDKSDIENADESSSSILKPLISPAAERIRFILGEEDDSPAPPQLFTELDELLAVDGQEMEWKETARWIKFEEKVEQGGERWSKPHVATLSLHSLFELRTCMEKGSIMLDREASSLPQLVEMIVDHQIETGLLKPELKDKVTYTLLRKHRHQTKKSNLRSLADIGKTVSSASRMFTNPDNGSPAMTHRNLTSSSLNDISDKPEKDQLKNKFMKKLPRDAEASNVLVGEVDFLDTPFIAFVRLQQAVMLGALTEVPVPTRFLFILLGPKGKAKSYHEIGRAIATLMSDEVFHDIAYKAKDRHDLIAGIDEFLDEVIVLPPGEWDPAIRIEPPKSLPSSDKRKNMYSGGENVQMNGDTPHDGGHGGGGHGDCEELQRTGRFCGGLIKDIKRKAPFFASDFYDALNIQALSAILFIYLATVTNAITFGGLLGDATDNMQGVLESFLGTAVSGAIFCLFAGQPLTILSSTGPVLVFERLLFNFSKDNNFDYLEFRLWIGLWSAFLCLILVATDASFLVQYFTRFTEEGFSSLISFIFIYDAFKKMIKLADYYPINSNFKVGYNTLFSCTCVPPDPANISISNDTTLAPEYLPTMSSTDMYHNTTFDWAFLSKKECSKYGGNLVGNNCNFVPDITLMSFILFLGTYTSSMALKKFKTSPYFPTTARKLISDFAIILSILIFCVIDALVGVDTPKLIVPSEFKPTSPNRGWFVPPFGENPWWVCLAAAIPALLVTILIFMDQQITAVIVNRKEHKLKKGAGYHLDLFWVAILMVICSLMALPWYVAATVISIAHIDSLKMETETSAPGEQPKFLGVREQRVTGTLVFILTGLSVFMAPILKFIPMPVLYGVFLYMGVASLNGVQFMDRLKLLLMPLKHQPDFIYLRHVPLRRVHLFTFLQVLCLALLWILKSTVAAIIFPVMILALVAVRKGMDYLFSQHDLSFLDDVIPEKDKKKKEDEKKKKKKKGSLDSDNDDEKDHQHSLNATHHADKIPFLQSLGMPSPPRTPVKVVPQIRIELEPEDNDYFWRSKGTETTL

SEQ ID NO: 36020 - protein, 801 aa, Homo sapiens
  REGION 1..801: note = ENSP00000411031
VMEVVEAEKIVLLTSARFLFLLLGPAGKAPQYHEIGRSIATLMTDEIFHDVAYKAKDRNDLLSGIDEFLDQVTVLPPGEWDPSIRIEPPKSVPSQEKRKIPVFHNGSTPTLGETPKEAAHHAGPELQRTGRLFGGLILDIKRKAPFFLSDFKDALSLQCLASILFLYCACMSPVITFGGLLGEATEGRISAIESLFGASLTGIAYSLFAGQPLTILGSTGPVLVFEKILYKFCRDYQLSYLSLRTSIGLWTSFLCIVLVATDASSLVCYITRFTEEAFAALICIIFIYEALEKLFDLGETYAFNMHNNLDKLTSYSCVCTEPPNPSNETLAQWKKDNITAHNISWRNLTVSECKKLRGVFLGSACGHHGPYIPDVLFWCVILFFTTFFLSSFLKQFKTKRYFPTKVRSTISDFAVFLTIVIMVTIDYLVGVPSPKLHVPEKFEPTHPERGWIISPLGDNPWWTLLIAAIPALLCTILIFMDQQITAVIINRKEHKLKKGAGYHLDLLMVGVMLGVCSVMGLPWFVAATVLSISHVNSLKVESECSAPGEQPKFLGIREQRVTGLMIFILMGLSVFMTSVLKFIPMPVLYGVFLYMGVSSLKGIQLFDRIKLFGMPAKHQPDLIYLRYVPLWKVHIFTVIQLTCLVLLWVIKVSAAAVVFPMMVLALVFVRKLMDLCFTKRELSWLDDLMPESKKKKEDDKKKKEKEEAERMLQDDDDTVHLPFEGGSLLQIPVKALKYSVDPSIVNISDEMAKTAQWKALSMNTENAKVTRSNMSPDKPVSVKISFEDEPRKKYVDAETSL

SEQ ID NO: 36021 - protein, 1214 aa, Homo sapiens
  REGION 1..1214: note = ENSP00000295736
MERFRLEKKLPGPDEEAVVDLGKTSSTVNTKFEKEELESHRAVYIGVHVPFSKESRRRHRHRGHKHHHRRRKDKESDKEDGRESPSYDTPSQRVQFILGTEDDDEEHIPHDLFTEMDELCYRDGEEYEWKETARWLKFEEDVEDGGDRWSKPYVATLSLHSLFELRSCILNGTVMLDMRASTLDEIADMVLDNMIASGQLDESIRENVREALLKRHHHQNEKRFTSRIPLVRSFADIGKKHSDPHLLERNGEGLSASRHSLRTGLSASNLSLRGESPLSLLLGHLLPSSRAGTPAGSRCTTPVPTPQNSPPSSPSISRLTSRSSQESQRQAPELLVSPASDDIPTVVIHPPEEDLEAALKGEEQKNEENVDLTPGILASPQSAPGNLDNSKSGEIKGNGSGGSRENSTVDFSKVDMNFMRKIPTGAEASNVLVGEVDFLERPIIAFVRLAPAVLLTGLTEVPVPTRFLFLLLGPAGKAPQYHEIGRSIATLMTDEIFHDVAYKAKDRNDLLSGIDEFLDQVTVLPPGEWDPSIRIEPPKSVPSQEKRKIPVFHNGSTPTLGETPKEAAHHAGPELQRTGRLFGGLILDIKRKAPFFLSDFKDALSLQCLASILFLYCACMSPVITFGGLLGEATEGRISAIESLFGASLTGIAYSLFAGQPLTILGSTGPVLVFEKILYKFCRDYQLSYLSLRTSIGLWTSFLCIVLVATDASSLVCYITRFTEEAFAALICIIFIYEALEKLFDLGETYAFNMHNNLDKLTSYSCVCTEPPNPSNETLAQWKKDNITAHNISWRNLTVSECKKLRGVFLGSACGHHGPYIPDVLFWCVILFFTTFFLSSFLKQFKTKRYFPTKVRSTISDFAVFLTIVIMVTIDYLVGVPSPKLHVPEKFEPTHPERGWIISPLGDNPWWTLLIAAIPALLCTILIFMDQQITAVIINRKEHKLKKGAGYHLDLLMVGVMLGVCSVMGLPWFVAATVLSISHVNSLKVESECSAPGEQPKFLGIREQRVTGLMIFILMGLSVFMTSVLKFIPMPVLYGVFLYMGVSSLKGIQLFDRIKLFGMPAKHQPDLIYLRYVPLWKVHIFTVIQLTCLVLLWVIKVSAAAVVFPMMVLALVFVRKLMDLCFTKRELSWLDDLMPESKKKKEDDKKKKEKEEAERMLQDDDDTVHLPFEGGSLLQIPVKALKYSPDKPVSVKISFEDEPRKKYVDAETSL

SEQ ID NO: 36022 - protein, 1090 aa, Homo sapiens
  REGION 1..1090: note = ENSP00000416368
MERFRLEKKLPGPDEEAVVDLGKTSSTVNTKFEKEELESHRAVYIGVHVPFSKESRRRHRHRGHKHHHRRRKDKESDKEDGRESPSYDTPSQRVQFILGTEDDDEEHIPHDLFTEMDELCYRDGEEYEWKETARWLKFEEDVEDGGDRWSKPYVATLSLHSLFELRSCILNGTVMLDMRASTLDEIADMVLDNMIASGQLDESIRENVREALLKRHHHQNEKRFTSRIPLVRSFADIGKKHSDPHLLERNGILASPQSAPGNLDNSKSGEIKGNGSGGSRENSTVDFSKVDMNFMRKIPTGAEASNVLVGEVDFLERPIIAFVRLAPAVLLTGLTEVPVPTRFLFLLLGPAGKAPQYHEIGRSIATLMTDEIFHDVAYKAKDRNDLLSGIDEFLDQVTVLPPGEWDPSIRIEPPKSVPSQEKRKIPVFHNGSTPTLGETPKEAAHHAGPELQRTGRLFGGLILDIKRKAPFFLSDFKDALSLQCLASILFLYCACMSPVITFGGLLGEATEGRISAIESLFGASLTGIAYSLFAGQPLTILGSTGPVLVFEKILYKFCRDYQLSYLSLRTSIGLWTSFLCIVLVATDASSLVCYITRFTEEAFAALICIIFIYEALEKLFDLGETYAFNMHNNLDKLTSYSCVCTEPPNPSNETLAQWKKDNITAHNISWRNLTVSECKKLRGVFLGSACGHHGPYIPDVLFWCVILFFTTFFLSSFLKQFKTKRYFPTKVRSTISDFAVFLTIVIMVTIDYLVGVPSPKLHVPEKFEPTHPERGWIISPLGDNPWWTLLIAAIPALLCTILIFMDQQITAVIINRKEHKLKKGAGYHLDLLMVGVMLGVCSVMGLPWFVAATVLSISHVNSLKVESECSAPGEQPKFLGIREQRVTGLMIFILMGLSVFMTSVLKFIPMPVLYGVFLYMGVSSLKGIQLFDRIKLFGMPAKHQPDLIYLRYVPLWKVHIFTVIQLTCLVLLWVIKVSAAAVVFPMMVLALVFVRKLMDLCFTKRELSWLDDLMPESKKKKEDDKKKKEKEEAERMLQDDDDTVHLPFEGGSLLQIPVKALKYSPDKPVSVKISFEDEPRKKYVDAETSL

SEQ ID NO: 36023 - protein, 1259 aa, Homo sapiens
  REGION 1..1259: note = ENSP00000390394
MEADGAGEQMRPLLTRVTSRGPDEEAVVDLGKTSSTVNTKFEKEELESHRAVYIGVHVPFSKESRRRHRHRGHKHHHRRRKDKESDKEDGRESPSYDTPSQRVQFILGTEDDDEEHIPHDLFTEMDELCYRDGEEYEWKETARWLKFEEDVEDGGDRWSKPYVATLSLHSLFELRSCILNGTVMLDMRASTLDEIADMVLDNMIASGQLDESIRENVREALLKRHHHQNEKRFTSRIPLVRSFADIGKKHSDPHLLERNGEGLSASRHSLRTGLSASNLSLRGESPLSLLLGHLLPSSRAGTPAGSRCTTPVPTPQNSPPSSPSISRLTSRSSQESQRQAPELLVSPASDDIPTVVIHPPEEDLEAALKGEEQKNEENVDLTPGILASPQSAPGNLDNSKSGEIKGNGSGGSRENSTVDFSKVDMNFMRKIPTGAEASNVLVGEVDFLERPIIAFVRLAPAVLLTGLTEVPVPTRFLFLLLGPAGKAPQYHEIGRSIATLMTDEIFHDVAYKAKDRNDLLSGIDEFLDQVTVLPPGEWDPSIRIEPPKSVPSQEKRKIPVFHNGSTPTLGETPKEAAHHAGPELQRTGRLFGGLILDIKRKAPFFLSDFKDALSLQCLASILFLYCACMSPVITFGGLLGEATEGRISAIESLFGASLTGIAYSLFAGQPLTILGSTGPVLVFEKILYKFCRDYQLSYLSLRTSIGLWTSFLCIVLVATDASSLVCYITRFTEEAFAALICIIFIYEALEKLFDLGETYAFNMHNNLDKLTSYSCVCTEPPNPSNETLAQWKKDNITAHNISWRNLTVSECKKLRGVFLGSACGHHGPYIPDVLFWCVILFFTTFFLSSFLKQFKTKRYFPTKVRSTISDFAVFLTIVIMVTIDYLVGVPSPKLHVPEKFEPTHPERGWIISPLGDNPWWTLLIAAIPALLCTILIFMDQQITAVIINRKEHKLKKGAGYHLDLLMVGVMLGVCSVMGLPWFVAATVLSISHVNSLKVESECSAPGEQPKFLGIREQRVTGLMIFILMGLSVFMTSVLKFIPMPVLYGVFLYMGVSSLKGIQLFDRIKLFGMPAKHQPDLIYLRYVPLWKVHIFTVIQLTCLVLLWVIKVSAAAVVFPMMVLALVFVRKLMDLCFTKRELSWLDDLMPESKKKKEDDKKKKEKEEAERMLQDDDDTVHLPFEGGSLLQIPVKALKYSVDPSIVNISDEMAKTAQWKALSMNTENAKVTRSNMSPDKPVSVKISFEDEPRKKYVDAETSL

SEQ ID NO: 36024 - protein, 1246 aa, Homo sapiens
  REGION 1..1246: note = ENSP00000414797
MEADGAGEQMRPLLTRVTSRGPDEEAVVDLGKTSSTVNTKFEKEELESHRAVYIGVHVPFSKESRRRHRHRGHKHHHRRRKDKESDKEDGRESPSYDTPSQRVQFILGTEDDDEEHIPHDLFTEMDELCYRDGEEYEWKETARWLKFEEDVEDGGDRWSKPYVATLSLHSLFELRSCILNGTVMLDMRASTLDEIADMVLDNMIASGQLDESIRENVREALLKRHHHQNEKRFTSRIPLVRSFADIGEGLSASRHSLRTGLSASNLSLRGESPLSLLLGHLLPSSRAGTPAGSRCTTPVPTPQNSPPSSPSISRLTSRSSQESQRQAPELLVSPASDDIPTVVIHPPEEDLEAALKGEEQKNEENVDLTPGILASPQSAPGNLDNSKSGEIKGNGSGGSRENSTVDFSKVDMNFMRKIPTGAEASNVLVGEVDFLERPIIAFVRLAPAVLLTGLTEVPVPTRFLFLLLGPAGKAPQYHEIGRSIATLMTDEIFHDVAYKAKDRNDLLSGIDEFLDQVTVLPPGEWDPSIRIEPPKSVPSQEKRKIPVFHNGSTPTLGETPKEAAHHAGPELQRTGRLFGGLILDIKRKAPFFLSDFKDALSLQCLASILFLYCACMSPVITFGGLLGEATEGRISAIESLFGASLTGIAYSLFAGQPLTILGSTGPVLVFEKILYKFCRDYQLSYLSLRTSIGLWTSFLCIVLVATDASSLVCYITRFTEEAFAALICIIFIYEALEKLFDLGETYAFNMHNNLDKLTSYSCVCTEPPNPSNETLAQWKKDNITAHNISWRNLTVSECKKLRGVFLGSACGHHGPYIPDVLFWCVILFFTTFFLSSFLKQFKTKRYFPTKVRSTISDFAVFLTIVIMVTIDYLVGVPSPKLHVPEKFEPTHPERGWIISPLGDNPWWTLLIAAIPALLCTILIFMDQQITAVIINRKEHKLKKGAGYHLDLLMVGVMLGVCSVMGLPWFVAATVLSISHVNSLKVESECSAPGEQPKFLGIREQRVTGLMIFILMGLSVFMTSVLKFIPMPVLYGVFLYMGVSSLKGIQLFDRIKLFGMPAKHQPDLIYLRYVPLWKVHIFTVIQLTCLVLLWVIKVSAAAVVFPMMVLALVFVRKLMDLCFTKRELSWLDDLMPESKKKKEDDKKKKEKEEAERMLQDDDDTVHLPFEGGSLLQIPVKALKYSVDPSIVNISDEMAKTAQWKALSMNTENAKVTRSNMSPDKPVSVKISFEDEPRKKYVDAETSL

SEQ ID NO: 36025 - protein, 463 aa, Homo sapiens
  REGION 1..463: note = ENSP00000408323
MEADGAGEQMRPLLTRGPDEEAVVDLGKTSSTVNTKFEKEELESHRAVYIGVHVPFSKESRRRHRHRGHKHHHRRRKDKESDKEDGRESPSYDTPSQRVQFILGTEDDDEEHIPHDLFTEMDELCYRDGEEYEWKETARWLKFEEDVEDGGDRWSKPYVATLSLHSLFELRSCILNGTVMLDMRASTLDEIADMVLDNMIASGQLDESIRENVREALLKRHHHQNEKRFTSRIPLVRSFADIGKKHSDPHLLERNGILASPQSAPGNLDNSKSGEIKGNGSGGSRENSTVDFSKVDMNFMRKIPTGAEASNVLVGEVDFLERPIIAFVRLAPAVLLTGLTEVPVPTRFLFLLLGPAGKAPQYHEIGRSIATLMTDEIFHDVAYKAKDRNDLLSGIDEFLDQVTVLPPGEWDPSIRIEPPKSVPSQEKRKIPVFHNGSTPTLGETPKEAAHHAGPELQRTGRVQ

SEQ ID NO: 36026 - protein, 574 aa, Homo sapiens
  REGION 1..574: note = ENSP00000407304
MEADGAGEQMRPLLTRGPDEEAVVDLGKTSSTVNTKFEKEELESHRAVYIGVHVPFSKESRRRHRHRGHKHHHRRRKDKESDKEDGRESPSYDTPSQRVQFILGTEDDDEEHIPHDLFTEMDELCYRDGEEYEWKETARWLKFEEDVEDGGDRWSKPYVATLSLHSLFELRSCILNGTVMLDMRASTLDEIADMVLDNMIASGQLDESIRENVREALLKRHHHQNEKRFTSRIPLVRSFADIGEGLSASRHSLRTGLSASNLSLRGESPLSLLLGHLLPSSRAGTPAGSRCTTPVPTPQNSPPSSPSISRLTSRSSQESQRQAPELLVSPASDDIPTVVIHPPEEDLEAALKGEEQKNEENVDLTPGILASPQSAPGNLDNSKSGEIKGNGSGGSRENSTVDFSKVDMNFMRKIPTGAEASNVLVGEVDFLERPIIAFVRLAPAVLLTGLTEVPVPTRFLFLLLGPAGKAPQYHEIGRSIATLMTDEIFHDVAYKAKDRNDLLSGIDEFLDQVTVLPPGEWDPSIRIEPPKSVPSQEKRKIPVFHNGSTPTLGETPKEAAHHAGPELQRTGRVQ

SEQ ID NO: 36027 - protein, 1095 aa, Homo sapiens
  REGION 1..1095: note = ENSP00000394252
MEADGAGEQMRPLLTRGPDEEAVVDLGKTSSTVNTKFEKEELESHRAVYIGVHVPFSKESRRRHRHRGHKHHHRRRKDKESDKEDGRESPSYDTPSQRVQFILGTEDDDEEHIPHDLFTEMDELCYRDGEEYEWKETARWLKFEEDVEDGGDRWSKPYVATLSLHSLFELRSCILNGTVMLDMRASTLDEIADMVLDNMIASGQLDESIRENVREALLKRHHHQNEKRFTSRIPLVRSFADIGKKHSDPHLLERNGILASPQSAPGNLDNSKSGEIKGNGSGGSRENSTVDFSKVDMNFMRKIPTGAEASNVLVGEVDFLERPIIAFVRLAPAVLLTGLTEVPVPTRFLFLLLGPAGKAPQYHEIGRSIATLMTDEIFHDVAYKAKDRNDLLSGIDEFLDQVTVLPPGEWDPSIRIEPPKSVPSQEKRKIPVFHNGSTPTLGETPKEAAHHAGPELQRTGRLFGGLILDIKRKAPFFLSDFKDALSLQCLASILFLYCACMSPVITFGGLLGEATEGRISAIESLFGASLTGIAYSLFAGQPLTILGSTGPVLVFEKILYKFCRDYQLSYLSLRTSIGLWTSFLCIVLVATDASSLVCYITRFTEEAFAALICIIFIYEALEKLFDLGETYAFNMHNNLDKLTSYSCVCTEPPNPSNETLAQWKKDNITAHNISWRNLTVSECKKLRGVFLGSACGHHGPYIPDVLFWCVILFFTTFFLSSFLKQFKTKRYFPTKVRSTISDFAVFLTIVIMVTIDYLVGVPSPKLHVPEKFEPTHPERGWIISPLGDNPWWTLLIAAIPALLCTILIFMDQQITAVIINRKEHKLKKGAGYHLDLLMVGVMLGVCSVMGLPWFVAATVLSISHVNSLKVESECSAPGEQPKFLGIREQRVTGLMIFILMGLSVFMTSVLKFIPMPVLYGVFLYMGVSSLKGIQLFDRIKLFGMPAKHQPDLIYLRYVPLWKVHIFTVIQLTCLVLLWVIKVSAAAVVFPMMVLALVFVRKLMDLCFTKRELSWLDDLMPESKKKKEDDKKKKEKEEAERMLQDDDDTVHLPFEGGSLLQIPVKALKYSPDKPVSVKISFEDEPRKKYVDAETSL

SEQ ID NO: 36028 - protein, 1206 aa, Homo sapiens
  REGION 1..1206: note = ENSP00000406605
MEADGAGEQMRPLLTRGPDEEAVVDLGKTSSTVNTKFEKEELESHRAVYIGVHVPFSKESRRRHRHRGHKHHHRRRKDKESDKEDGRESPSYDTPSQRVQFILGTEDDDEEHIPHDLFTEMDELCYRDGEEYEWKETARWLKFEEDVEDGGDRWSKPYVATLSLHSLFELRSCILNGTVMLDMRASTLDEIADMVLDNMIASGQLDESIRENVREALLKRHHHQNEKRFTSRIPLVRSFADIGEGLSASRHSLRTGLSASNLSLRGESPLSLLLGHLLPSSRAGTPAGSRCTTPVPTPQNSPPSSPSISRLTSRSSQESQRQAPELLVSPASDDIPTVVIHPPEEDLEAALKGEEQKNEENVDLTPGILASPQSAPGNLDNSKSGEIKGNGSGGSRENSTVDFSKVDMNFMRKIPTGAEASNVLVGEVDFLERPIIAFVRLAPAVLLTGLTEVPVPTRFLFLLLGPAGKAPQYHEIGRSIATLMTDEIFHDVAYKAKDRNDLLSGIDEFLDQVTVLPPGEWDPSIRIEPPKSVPSQEKRKIPVFHNGSTPTLGETPKEAAHHAGPELQRTGRLFGGLILDIKRKAPFFLSDFKDALSLQCLASILFLYCACMSPVITFGGLLGEATEGRISAIESLFGASLTGIAYSLFAGQPLTILGSTGPVLVFEKILYKFCRDYQLSYLSLRTSIGLWTSFLCIVLVATDASSLVCYITRFTEEAFAALICIIFIYEALEKLFDLGETYAFNMHNNLDKLTSYSCVCTEPPNPSNETLAQWKKDNITAHNISWRNLTVSECKKLRGVFLGSACGHHGPYIPDVLFWCVILFFTTFFLSSFLKQFKTKRYFPTKVRSTISDFAVFLTIVIMVTIDYLVGVPSPKLHVPEKFEPTHPERGWIISPLGDNPWWTLLIAAIPALLCTILIFMDQQITAVIINRKEHKLKKGAGYHLDLLMVGVMLGVCSVMGLPWFVAATVLSISHVNSLKVESECSAPGEQPKFLGIREQRVTGLMIFILMGLSVFMTSVLKFIPMPVLYGVFLYMGVSSLKGIQLFDRIKLFGMPAKHQPDLIYLRYVPLWKVHIFTVIQLTCLVLLWVIKVSAAAVVFPMMVLALVFVRKLMDLCFTKRELSWLDDLMPESKKKKEDDKKKKEKEEAERMLQDDDDTVHLPFEGGSLLQIPVKALKYSPDKPVSVKISFEDEPRKKYVDAETSL

SEQ ID NO: 36029 - protein, 1131 aa, Homo sapiens
  REGION 1..1131: note = ENSP00000407382
MEADGAGEQMRPLLTRGPDEEAVVDLGKTSSTVNTKFEKEELESHRAVYIGVHVPFSKESRRRHRHRGHKHHHRRRKDKESDKEDGRESPSYDTPSQRVQFILGTEDDDEEHIPHDLFTEMDELCYRDGEEYEWKETARWLKFEEDVEDGGDRWSKPYVATLSLHSLFELRSCILNGTVMLDMRASTLDEIADMVLDNMIASGQLDESIRENVREALLKRHHHQNEKRFTSRIPLVRSFADIGKKHSDPHLLERNGILASPQSAPGNLDNSKSGEIKGNGSGGSRENSTVDFSKVDMNFMRKIPTGAEASNVLVGEVDFLERPIIAFVRLAPAVLLTGLTEVPVPTRFLFLLLGPAGKAPQYHEIGRSIATLMTDEIFHDVAYKAKDRNDLLSGIDEFLDQVTVLPPGEWDPSIRIEPPKSVPSQEKRKIPVFHNGSTPTLGETPKEAAHHAGPELQRTGRLFGGLILDIKRKAPFFLSDFKDALSLQCLASILFLYCACMSPVITFGGLLGEATEGRISAIESLFGASLTGIAYSLFAGQPLTILGSTGPVLVFEKILYKFCRDYQLSYLSLRTSIGLWTSFLCIVLVATDASSLVCYITRFTEEAFAALICIIFIYEALEKLFDLGETYAFNMHNNLDKLTSYSCVCTEPPNPSNETLAQWKKDNITAHNISWRNLTVSECKKLRGVFLGSACGHHGPYIPDVLFWCVILFFTTFFLSSFLKQFKTKRYFPTKVRSTISDFAVFLTIVIMVTIDYLVGVPSPKLHVPEKFEPTHPERGWIISPLGDNPWWTLLIAAIPALLCTILIFMDQQITAVIINRKEHKLKKGAGYHLDLLMVGVMLGVCSVMGLPWFVAATVLSISHVNSLKVESECSAPGEQPKFLGIREQRVTGLMIFILMGLSVFMTSVLKFIPMPVLYGVFLYMGVSSLKGIQLFDRIKLFGMPAKHQPDLIYLRYVPLWKVHIFTVIQLTCLVLLWVIKVSAAAVVFPMMVLALVFVRKLMDLCFTKRELSWLDDLMPESKKKKEDDKKKKEKEEAERMLQDDDDTVHLPFEGGSLLQIPVKALKYSVDPSIVNISDEMAKTAQWKALSMNTENAKVTRSNMSPDKPVSVKISFEDEPRKKYVDAETSL

SEQ ID NO: 36030 - protein, 1210 aa, Homo sapiens
  REGION 1..1210: note = ENSP00000406804
MEADGAGEQMRPLLTRVTSRGPDEEAVVDLGKTSSTVNTKFEKEELESHRAVYIGVHVPFSKESRRRHRHRGHKHHHRRRKDKESDKEDGRESPSYDTPSQRVQFILGTEDDDEEHIPHDLFTEMDELCYRDGEEYEWKETARWLKFEEDVEDGGDRWSKPYVATLSLHSLFELRSCILNGTVMLDMRASTLDEIADMVLDNMIASGQLDESIRENVREALLKRHHHQNEKRFTSRIPLVRSFADIGEGLSASRHSLRTGLSASNLSLRGESPLSLLLGHLLPSSRAGTPAGSRCTTPVPTPQNSPPSSPSISRLTSRSSQESQRQAPELLVSPASDDIPTVVIHPPEEDLEAALKGEEQKNEENVDLTPGILASPQSAPGNLDNSKSGEIKGNGSGGSRENSTVDFSKVDMNFMRKIPTGAEASNVLVGEVDFLERPIIAFVRLAPAVLLTGLTEVPVPTRFLFLLLGPAGKAPQYHEIGRSIATLMTDEIFHDVAYKAKDRNDLLSGIDEFLDQVTVLPPGEWDPSIRIEPPKSVPSQEKRKIPVFHNGSTPTLGETPKEAAHHAGPELQRTGRLFGGLILDIKRKAPFFLSDFKDALSLQCLASILFLYCACMSPVITFGGLLGEATEGRISAIESLFGASLTGIAYSLFAGQPLTILGSTGPVLVFEKILYKFCRDYQLSYLSLRTSIGLWTSFLCIVLVATDASSLVCYITRFTEEAFAALICIIFIYEALEKLFDLGETYAFNMHNNLDKLTSYSCVCTEPPNPSNETLAQWKKDNITAHNISWRNLTVSECKKLRGVFLGSACGHHGPYIPDVLFWCVILFFTTFFLSSFLKQFKTKRYFPTKVRSTISDFAVFLTIVIMVTIDYLVGVPSPKLHVPEKFEPTHPERGWIISPLGDNPWWTLLIAAIPALLCTILIFMDQQITAVIINRKEHKLKKGAGYHLDLLMVGVMLGVCSVMGLPWFVAATVLSISHVNSLKVESECSAPGEQPKFLGIREQRVTGLMIFILMGLSVFMTSVLKFIPMPVLYGVFLYMGVSSLKGIQLFDRIKLFGMPAKHQPDLIYLRYVPLWKVHIFTVIQLTCLVLLWVIKVSAAAVVFPMMVLALVFVRKLMDLCFTKRELSWLDDLMPESKKKKEDDKKKKEKEEAERMLQDDDDTVHLPFEGGSLLQIPVKALKYSPDKPVSVKISFEDEPRKKYVDAETSL

SEQ ID NO: 36031 - protein, 463 aa, Homo sapiens; identical to SEQ ID NO: 36025
  REGION 1..463: note = ENSP00000409418

SEQ ID NO: 36032 - protein, 1051 aa, Homo sapiens
  REGION 1..1051: note = ENSP00000388703
MERFRLEKKLPGPDEEAVVDLGKTSSTVNTKFEKEELESHRAVYIGVHVPFSKESRRRHRHRGHKHHHRRRKDKESDKEDGRESPSYDTPSQRVQFILGTEDDDEEHIPHDLFTEMDELCYRDGEEYEWKETARWLKFEEDVEDGGDRWSKPYVATLSLHSLFELRSCILNGTVMLDMRASTLDEIADMVLDNMIASGQLDESIRENVREALLKRHHHQNEKRFTSRIPLVRSFADIGKKHSDPHLLERNGILASPQSAPGNLDNSKSGEIKGNGSGGSRENSTVDFSKESASWHCSCGTLGVGLKRPAVDMNFMRKIPTGAEASNVLVGEVDFLERPIIAFVRLAPAVLLTGLTEVPVPTRFLFLLLGPAGKAPQYHEIGRSIATLMTDEIFHDVAYKAKDRNDLLSGIDEFLDQVTVLPPGEWDPSIRIEPPKSVPSQEKRKIPVFHNGSTPTLGETPKEAAHHAGPELQRTGRLFGGLILDIKRKAPFFLSDFKDALSLQCLASILFLYCACMSPVITFGGLLGEATEGRISAIESLFGASLTGIAYSLFAGQPLTILGSTGPVLVFEKILYKFCRDYQLSYLSLRTSIGLWTSFLCIVLVATDASSLVCYITRFTEEAFAALICIIFIYEALEKLFDLGETYAFNMHNNLDKLTSYSCVCTEPPNPSNETLAQWKKDNITAHNISWRNLTVSECKKLRGVFLGSACGHHGPYIPDVLFWCVILFFTTFFLSSFLKQFKTKRYFPTKVRSTISDFAVFLTIVIMVTIDYLVGVPSPKLHVPEKFEPTHPERGWIISPLGDNPWWTLLIAAIPALLCTILIFMDQQITAVIINRKEHKLKKGAGYHLDLLMVGVMLGVCSVMGLPWFVAATVLSISHVNSLKVESECSAPGEQPKFLGIREQRVTGLMIFILMGLSVFMTSVLKFIPMPVLYGVFLYMGVSSLKGIQLFDRIKLFGMPAKHQPDLIYLRYVPLWKVHIFTVIQLTCLVLLWVIKVSAAAVVFPMMVLALVFVRKLMDLCFTKRELSWLDDLMPESKKKKEDDKKKKEKE

SEQ ID NO: 36033 - protein, 1201 aa, Homo sapiens [sequence omitted]

SEQ ID NO: 36034 - protein, 675 aa, Homo sapiens
  REGION 1..675: note = ENSP00000289932
MESGTSSPQPPQLDPLDAFPQKGLEPGDIAVLVLYFLFVLAVGLWSTVKTKRDTVKGYFLAGGDMVWWPVGASLFASNVGSGHFIGLAGSGAATGISVSAYELNGLFSVLMLAWIFLPIYIAGQVTTMPEYLRKRFGGIRIPIILAVLYLFIYIFTKISVDMYAGAIFIQQSLHLDLYLAIVGLLAITAVYTVAGGLAAVIYTDALQTLIMLIGALTLMGYSFAAVGGMEGLKEKYFLALASNRSENSSCGLPREDAFHIFRDPLTSDLPWPGVLFGMSIPSLWYWCTDQVIVQRTLAAKNLSHAKGGALMAAYLKVLPLFIMVFPGMVSRILFPDQVACADPEICQKICSNPSGCSDIAYPKLVLELLPTGLRGLMMAVMVAALMSSLTSIFNSASTIFTMDLWNHLRPRASEKELMIVGRVFVLLLVLVSILWIPVVQASQGGQLFIYIQSISSYLQPPVAVVFIMGCFWKRTNEKGAFWGLISGLLLGLVRLVLDFIYVQPRCDQPDERPVLVKSIHYLYFSMILSTVTLITVSTVSWFTEPPSKEMVSHLTWFTRHDPVVQKEQAPPAAPLSLTLSQNGMPEASSSSSVQFEMVQENTSKTHSCDMTPKQSKVVKAILWLCGIQEKGKEELPARAEAIIVSLEENPLVKTLLDVNLIFCVSCAIFIWGYFA

SEQ ID NO: 36035 - protein, 62 aa, Homo sapiens
  REGION 1..62: note = ENSP00000458806
MESGTSSPQPPQLDPLDAFPQKGLEPGDIAVLVLYFLFVLAVGLWVGSPSVAQGTRTQWWQS

SEQ ID NO: 36036 - protein, 611 aa, Homo sapiens
  REGION 1..611: note = ENSP00000457179
MVWWPVGASLFASNVGSGHFIGLAGSGAATGISVSAYELNGLFSVLMLAWIFLPIYIAGQVTTMPEYLRKRFGGIRIPIILAVLYLFIYIFTKISVDMYAGAIFIQQSLHLDLYLAIVGLLAITAVYTVAGGLAAVIYTDALQTLIMLIGALTLMGYSFAAVGGMEGLKEKYFLALASNRSENSSCGLPREDAFHIFRDPLTSDLPWPGVLFGMSIPSLWYWCTDQVIVQRTLAAKNLSHAKGGALMAAYLKVLPLFIMVFPGMVSRILFPDQVACADPEICQKICSNPSGCSDIAYPKLVLELLPTGLRGLMMAVMVAALMSSLTSIFNSASTIFTMDLWNHLRPRASEKELMIVGRVFVLLLVLVSILWIPVVQASQGGQLFIYIQSISSYLQPPVAVVFIMGCFWKRTNEKGAFWGLISGLLLGLVRLVLDFIYVQPRCDQPDERPVLVKSIHYLYFSMILSTVTLITVSTVSWFTEPPSKEMVSHLTWFTRHDPVVQKEQAPPAAPLSLTLSQNGMPEASSSSSVQFEMVQENTSKTHSCDMTPKQSKVVKAILWLCGIQEKGKEELPARAEAIIVSLEENPLVKTLLDVNLIFCVSCAIFIWGYFA

SEQ ID NO: 36037 - protein, 91 aa, Homo sapiens
  REGION 1..91: note = ENSP00000454732
MESGTSSPQPPQLDPLDAFPQKGLEPGDIAVLVLYFLFVLAVGLWSTVKTKRDTVKGYFLAGGDMVWWPVGASLFASNVGSGHFIGLAGSG

SEQ ID NO: 36038 - protein, 605 aa, Homo sapiens
  REGION 1..605: note = ENSP00000456234
MESGTSSPQPPQLDPLDAFPQKGLEPGDIAVLVLYFLFVLAVGLWSTVKTKRDTVKGYFLAGGDMVWWPGLFSVLMLAWIFLPIYIAGQVDMYAGAIFIQQSLHLDLYLAIVGLLAITAVYTVAGGLAAVIYTDALQTLIMLIGALTLMGYSFAAVGGMEGLKEKYFLALASNRSENSSCGLPREDAFHIFRDPLTSDLPWPGVLFGMSIPSLWYWCTDQVIVQRTLAAKNLSHAKGGALMAAYLKVLPLFIMVFPGMVSRILFPDQVACADPEICQKICSNPSGCSDIAYPKLVLELLPTGLRGLMMAVMVAALMSSLTSIFNSASTIFTMDLWNHLRPRASEKELMIVGRVFVLLLVLVSILWIPVVQASQGGQLFIYIQSISSYLQPPVAVVFIMGCFWKRTNEKGAFWGLISGLLLGLVRLVLDFIYVQPRCDQPDERPVLVKSIHYLYFSMILSTVTLITVSTVSWFTEPPSKEMVSHLTWFTRHDPVVQKEQAPPAAPLSLTLSQNGMPEASSSSSVQFEMVQENTSKTHSCDMTPKQSKVVKAILWLCGIQEKGKEELPARAEAIIVSLEENPLVKTLLDVNLIFCVSCAIFIWGYFA

SEQ ID NO: 36039 - protein, 640 aa, Homo sapiens
  REGION 1..640: note = ENSP00000454401
MESGTSSPQPPQLDPLDAFPQKGLEPGDIAVLVLYFLFVLAVGLWSTVKTKRDTVKGYFLAGGDMVWWPVGASLFASNVGSGHFIGLAGSGAATGISVSAYELNGLFSVLMLAWIFLPIYIAGQVDMYAGAIFIQQSLHLDLYLAIVGLLAITAVYTVAGGLAAVIYTDALQTLIMLIGALTLMGYSFAAVGGMEGLKEKYFLALASNRSENSSCGLPREDAFHIFRDPLTSDLPWPGVLFGMSIPSLWYWCTDQVIVQRTLAAKNLSHAKGGALMAAYLKVLPLFIMVFPGMVSRILFPDQVACADPEICQKICSNPSGCSDIAYPKLVLELLPTGLRGLMMAVMVAALMSSLTSIFNSASTIFTMDLWNHLRPRASEKELMIVGRVFVLLLVLVSILWIPVVQASQGGQLFIYIQSISSYLQPPVAVVFIMGCFWKRTNEKGAFWGLISGLLLGLVRLVLDFIYVQPRCDQPDERPVLVKSIHYLYFSMILSTVTLITVSTVSWFTEPPSKEMVSHLTWFTRHDPVVQKEQAPPAAPLSLTLSQNGMPEASSSSSVQFEMVQENTSKTHSCDMTPKQSKVVKAILWLCGIQEKGKEELPARAEAIIVSLEENPLVKTLLDVNLIFCVSCAIFIWGYFA

SEQ ID NO: 36040 - protein, 519 aa, Homo sapiens
  REGION 1..519: note = ENSP00000456376
MVWWPVGASLFASNVGSGHFIGLAGSGAATGISVSAYELNGLFSVLMLAWIFLPIYIAGQVTTMPEYLRKRFGGIRIPIILAVLYLFIYIFTKISVDMYAGAIFIQQSLHLDLYLAIVGLLAITAVYTVAGGLAAVIYTDALQTLIMLIGALTLMGYSDCPADSGCQEPVPCQRRCSDGCIPEGAAPLHNGVPWDGQPHPLPRSSGLCRSRDLPEDLQQPLRLFGHRVSQTRAGTPAHSASTIFTMDLWNHLRPRASEKELMIVGRVFVLLLVLVSILWIPVVQASQGGQLFIYIQSISSYLQPPVAVVFIMGCFWKRTNEKGAFWGLISGLLLGLVRLVLDFIYVQPRCDQPDERPVLVKSIHYLYFSMILSTVTLITVSTVSWFTEPPSKEMVSHLTWFTRHDPVVQKEQAPPAAPLSLTLSQNGMPEASSSSSVQFEMVQENTSKTHSCDMTPKQSKVVKAILWLCGIQEKGKEELPARAEAIIVSLEENPLVKTLLDVNLIFCVSCAIFIWGYFA

SEQ ID NO: 36041 - protein, 605 aa, Homo sapiens; identical to SEQ ID NO: 36038
  REGION 1..605: note = ENSP00000441384

SEQ ID NO: 36042 - protein, 519 aa, Homo sapiens; identical to SEQ ID NO: 36040
  REGION 1..519: note = ENSP00000389606

SEQ ID NO: 36043 - protein, 640 aa, Homo sapiens; identical to SEQ ID NO: 36039
  REGION 1..640: note = ENSP00000416782

SEQ ID NO: 36044 - protein, 659 aa, Homo sapiens
  REGION 1..659: note = ENSP00000266086
MASTVSPSTIAETPEPPPLSDHIRNAADISVIVIYFLVVMAVGLWAMLKTNRGTIGGFFLAGRDMAWWPMGASLFASNIGSNHYVGLAGTGAASGVATVTFEWTSSVMLLILGWIFVPIYIKSGVMTMPEYLKKRFGGERLQVYLSILSLFICVVLLISADIFAGAIFIKLALGLDLYLAIFILLAMTAVYTTTGGLASVIYTDTLQTIIMLIGSFILMGFAFNEVGGYESFTEKYVNATPSVVEGDNLTISASCYTPRADSFHIFRDAVTGDIPWPGIIFGMPITALWYWCTNQVIVQRCLCGKDMSHVKAACIMCAYLKLLPMFLMVMPGMISRILYTDMVACVVPSECVKHCGVDVGCTNYAYPTMVLELMPQGLRGLMLSVMLASLMSSLTSIFNSASTLFTIDLYTKMRKQASEKELLIAGRIFVLLLTVVSIVWVPLVQVSQNGQLIHYTESISSYLGPPIAAVFVLAIFCKRVNEQGAFWGLMVGLAMGLIRMITEFAYGTGSCLAPSNCPKIICGVHYLYFSIVLFFGSMLVTLGISLLTKPIPDVHLYRLCWVLRNSTEERIDIDAEEKSQEETDDGVEEDYPEKSRGCLKKAYDLFCGLQKGPKLTKEEEEALSKKLTDTSERPSWRTIVNINAILLLAVVVFIHGYYA

SEQ ID NO: 36045 - protein, 580 aa, Homo sapiens
  REGION 1..580: note = ENSP00000387346
MAFHVEGLIAIIVFYLLILLVGIWAAWRTKNSGSAEERSEAIIVGGRDIGLLVGGFTMTATWVGGGYINGTAEAVYVPGYGLAWAQAPIGYSLSLILGGLFFAKPMRSKGYVTMLDPFQQIYGKRMGGLLFIPALMGEMFWAAAIFSALGATISVIIDVDMHISVIISALIATLYTLVGGLYSVAYTDVVQLFCIFVGLWISVPFALSHPAVADIGFTAVHAKYQKPWLGTVDSSEVYSWLDSFLLLMLGGIPWQAYFQRVLSSSSATYAQVLSFLAAFGCLVMAIPAILIGAIGASTDWNQTAYGLPDPKTTEEADMILPIVLQYLCPVYISFFGLGAVSAAVMSSADSSILSASSMFARNIYQLSFRQNASDKEIVWVMRITVFVFGASATAMALLTKTVYGLWYLSSDLVYIVIFPQLLCVLFVKGTNTYGAVAGYVSGLFLRITGGEPYLYLQPLIFYPGYYPDDNGIYNQKFPFKTLAMVTSFLTNICISYLAKYLFESGTLPPKLDVFDAVVARHSEENMDKTILVKNENIKLDELALVKPRQSMTLSSTFTNKEAFLDVDSSPEGSGTEDNLQ

SEQ ID NO: 36046 - protein, 580 aa, Homo sapiens; identical to SEQ ID NO: 36045
  REGION 1..580: note = ENSP00000264047

SEQ ID NO: 36047 - protein, 610 aa, Homo sapiens
  REGION 1..610: note = ENSP00000445340
MDTPRGIGTFVVWDYVVFAGMLVISAAIGIYYAFAGGGQQTSKDFLMGGRRMTAVPVALSLTASFMSAVTVLGTPSEVYRFGAIFSIFAFTYFFVVVISAEVFLPVFYKLGITSTYEYLELRFNKCVRLCGTVLFIVQTILYTGIVIYAPALALNQVTGFDLWGAVVATGVVCTFYCTLGGLKAVIWTDVFQVGIMVAGFASVIIQAVVMQGGISTILNDAYDGGRLNFWNFNPNPLQRHTFWTIIIGGTFTWTSIYGVNQSQVQRYISCKSRFQAKLSLYINLVGLWAILTCSVFCGLALYSRYHDCDPWTAKKVSAPDQLMPYLVLDILQDYPGLPGLFVACAYSGTLSTVSSSINALAAVTVEDLIKPYFRSLSERSLSWISQGMSVVYGALCIGMAALASLMGALLQAALSVFGMVGGPLMGLFALGILVPFANSIGALVGLMAGFAISLWVGIGAQIYPPLPERTLPLHLDIQGCNSTYNETNLMTTTEMPFTTSVFQIYNVQRTPLMDNWYSLSYLYFSTVGTLVTLLVGILVSLSTGGRKQNLDPRYILTKEDFLSNFDIFKKKKHVLSYKSHPVEDGGTDNPAFNHIELNSDQSGKSNGTRL

SEQ ID NO: 36048 - protein, 610 aa, Homo sapiens; identical to SEQ ID NO: 36047
  REGION 1..610: note = ENSP00000461697

SEQ ID NO: 36049 - protein, 614 aa, Homo sapiens
  REGION 1..614: note = ENSP00000352702
MDGKVAVQECGPPAVSWVPEEGEKLDQEDEDQVKDRGQWTNKMEFVLSVAGEIIGLGNVWRFPYLCYKNGGGAFFIPYFIFFFVCGIPVFFLEVALGQYTSQGSVTAWRKICPLFQGIGLASVVIESYLNVYYIIILAWALFYLFSSFTSELPWTTCNNFWNTEHCTDFLNHSGAGTVTPFENFTSPVMEFWERRVLGITSGIHDLGSLRWELALCLLLAWVICYFCIWKGVKSTGKVVYFTATFPYLMLVILLIRGVTLPGAYQGIIYYLKPDLFRLKDPQVWMDAGTQIFFSFAICQGCLTALGSYNKYHNNCYKDCIALCFLNSATSFVAGFVVFSILGFMSQEQGVPISEVAESGPGLAFIAFPKAVTMMPLSQLWSCLFFIMLIFLGLDSQFVCVECLVTASIDMFPRQLRKSGRRELLILTIAVMCYLIGLFLVTEGGMYIFQLFDYYASSGICLLFLSLFEVVCISWVYGADRFYDNIEDMIGYRPWPLVKISWLFLTPGLCLATFLFSLSKYTPLKYNNVYVYPPWGYSIGWFLALSSMVCVPLFVVITLLKTRGPFRKRLRQLITPDSSLPQPKQHPCLDGSAGRNFGPSPTREGLIAGEKETHL

SEQ ID NO: 36050 - protein, 614 aa, Homo sapiens; identical to SEQ ID NO: 36049
  REGION 1..614: note = ENSP00000399136

SEQ ID NO: 36051 - protein, 614 aa, Homo sapiens; identical to SEQ ID NO: 36049
  REGION 1..614: note = ENSP00000444268

SEQ ID NO: 36052 - protein, 146 aa, Homo sapiens
  REGION 1..146: note = ENSP00000439351
MDGKVAVQECGPPAVSWVPEEGEKLDQEDEDQVKDRGQWTNKMEFVLSVAGEIIGLGNVWRFPYLCYKNGGGAFFIPYFIFFFVCGIPVFFLEVALGQYTSQGSVTAWRKICPLFQGIGLASVVIESYLNVYYIIILAWALFYLFS

SEQ ID NO: 36053 - protein, 81 aa, Homo sapiens
  REGION 1..81: note = ENSP00000446082
MDGKVAVQECGPPAVSWVPEEGEKLDQEDEDQEPSSSPTSSSSLSAASRCSSWRWRWANTPAKGVSQPGGRSAPSSRALVW

SEQ ID NO: 36054 - protein, 614 aa, Homo sapiens; identical to SEQ ID NO: 36049
  REGION 1..614: note = ENSP00000380464

SEQ ID NO: 36055 - protein, 602 aa, Homo sapiens
  REGION 1..602: note = ENSP00000339260
MDSRVSGTTSNGETKPVYPVMEKKEEDGTLERGHWNNKMEFVLSVAGEIIGLGNVWRFPYLCYKNGGGAFFIPYLVFLFTCGIPVFLLETALGQYTSQGGVTAWRKICPIFEGIGYASQMIVILLNVYYIIVLAWALFYLFSSFTIDLPWGGCYHEWNTEHCMEFQKTNGSLNGTSENATSPVIEFWERRVLKISDGIQHLGALRWELALCLLLAWVICYFCIWKGVKSTGKVVYFTATFPYLMLVVLLIRGVTLPGAAQGIQFYLYPNLTRLWDPQVWMDAGTQIFFSFAICLGCLTALGSYNKYHNNCYRDCIALCFLNSGTSFVAGFAIFSILGFMSQEQGVPISEVAESGPGLAFIAYPRAVVMLPFSPLWACCFFFMVVLLGLDSQFVCVESLVTALVDMYPHVFRKKNRREVLILGVSVVSFLVGLIMLTEGGMYVFQLFDYYAASGMCLLFVAIFESLCVAWVYGAKRFYDNIEDMIGYRPWPLIKYCWLFLTPAVCTATFLFSLIKYTPLTYNKKYTYPWWGDALGWLLALSSMVCIPAWSLYRLGTLKGPFRERIRQLMCPAEDLPQRNPAGPSAPATPRTSLLRLTELESHC

SEQ ID NO: 36056 - protein, 150 aa, Homo sapiens
  REGION 1..150: note = ENSP00000444606
MDSRVSGTTSNGETKPVYPVMEKKEEDGTLERGHWNNKMEFVLSVAGEIIGLGNVWRFPYLCYKNGGEHCMEFQKTNGSLNGTSENATSPVIEFWERRVLKISDGIQHLGALRWELALCLLLAWVICYFCIWKGVKSTGKVVYFTATFPY

SEQ ID NO: 36057 - protein, 123 aa, Homo sapiens
  REGION 1..123: note = ENSP00000437386
MDSRVSGTTSNGETKPVYPVMEKKEEDGTLERGHWNNKMEFVLSVAGEIIGLGNVWRFPYLCYKNGGGAFFIPYLVFLFTCGIPVFLLETALGQYTSQGGVTAWRKICPIFEVSPQALAMPPR

SEQ ID NO: 36058 - protein, 69 aa, Homo sapiens
  REGION 1..69: note = ENSP00000443466
MIVILLNVYYIIVLAWALFYLFSSFTIDLPWGGCYHEWNTGGDFAQDAYIEMLACLEAADLKSTFPVAI

SEQ ID NO: 36059 - protein, 97 aa, Homo sapiens
  REGION 1..97: note = ENSP00000389316
MDSRVSGTTSNGETKPVYPVMEKKEEDGTLERGHWNNKMEFVLSVAGEIIGLGNVWRFPYLCYKNGGGEMRALVPPHPLLEGGYFHLLHLRPLWGVP

SEQ ID NO: 36060 - protein, 510 aa, Homo sapiens
  REGION 1..510: note = ENSP00000407104
MDSRVSGTTSNGETKPVYPVMEKKEEDGTLERGHWNNKMEFVLSVAGEIIGLGNVWRFPYLCYKNGGEHCMEFQKTNGSLNGTSENATSPVIEFWERRVLKISDGIQHLGALRWELALCLLLAWVICYFCIWKGVKSTGKVVYFTATFPYLMLVVLLIRGVTLPGAAQGIQFYLYPNLTRLWDPQVWMDAGTQIFFSFAICLGCLTALGSYNKYHNNCYRDCIALCFLNSGTSFVAGFAIFSILGFMSQEQGVPISEVAESGPGLAFIAYPRAVVMLPFSPLWACCFFFMVVLLGLDSQFVCVESLVTALVDMYPHVFRKKNRREVLILGVSVVSFLVGLIMLTEGGMYVFQLFDYYAASGMCLLFVAIFESLCVAWVYGAKRFYDNIEDMIGYRPWPLIKYCWLFLTPAVCTATFLFSLIKYTPLTYNKKYTYPWWGDALGWLLALSSMVCIPAWSLYRLGTLKGPFRERIRQLMCPAEDLPQRNPAGPSAPATPRTSLLRLTELESHC

SEQ ID NO: 36061 - protein, 636 aa, Homo sapiens
  REGION 1..636: note = ENSP00000230671
MKKLQGAHLRKPVTPDLLMTPSDQGDVDLDVDFAAHRGNWTGKLDFLLSCIGYCVGLGNVWRFPYRAYTNGGGAFLVPYFLMLAICGIPLFFLELSLGQFSSLGPLAVWKISPLFKGAGAAMLLIVGLVAIYYNMIIAYVLFYLFASLTSDLPWEHCGNWWNTELCLEHRVSKDGNGALPLNLTCTVSPSEEYWSRYVLHIQGSQGIGSPGEIRWNLCLCLLLAWVIVFLCILKGVKSSGKVVYFTATFPYLILLMLLVRGVTLPGAWKGIQFYLTPQFHHLLSSKVWIEAALQIFYSLGVGFGGLLTFASYNTFHQNIYRDTFIVTLGNAITSILAGFAIFSVLGYMSQELGVPVDQVAKAGPGLAFVVYPQAMTMLPLSPFWSFLFFFMLLTLGLDSQFAFLETIVTAVTDEFPYYLRPKKAVFSGLICVAMYLMGLILTTDGGMYWLVLLDDYSASFGLMVVVITTCLAVTRVYGIQRFCRDIHMMLGFKPGLYFRACWLFLSPATLLALMVYSIVKYQPSEYGSYRFPPWAELLGILMGLLSCLMIPAGMLVAVLREEGSLWERLQQASRPAMDWGPSLEENRTGMYVATLAGSQSPKPLMVHMRKYGGITSFENTAIEVDREIAEEEESMM

SEQ ID NO: 36062 - protein, 666 aa, Homo sapiens
  REGION 1..666: note = ENSP00000428200
MKKLQGAHLRKPVTPDLLMTPSDQGDVDLDVDFAAHRGNWTGKLDFLLSCIGYCVGLGNVWRFPYRAYTNGGGAFLVPYFLMLAICGIPLFFLELSLGQFSSLGPLAVWKISPLFKGAGAAMLLIVGLVAIYYNMIIAYVLFYLFASLTSDLPWEHCGNWWNTELCLEHRVSKDGNGALPLNLTCTVSPSEEYWSRYVLHIQGSQGIGSPGEIRWNLCLCLLLAWVIVFLCILKGVKSSGKVVYFTATFPYLILLMLLVRGVTLPGAWKGIQFYLTPQFHHLLSSKVWIEAALQIFYSLGVGFGGLLTFASYNTFHQNIYRDTFIVTLGNAITSILAGFAIFSVLGYMSQELGVPVDQVAKAGPGLAFVVYPQAMTMLPLSPFWSFLFFFMLLTLGLDSQFAFLETIVTAVTDEFPYYLRPKKAVFSGLICVAMYLMGLILTTDGGMYWLVLLDDYSASFGLMVVVITTCLAVTRVYGIQRFCRDIHMMLGFKPGLYFRACWLFLSPATLLALMVYSIVKYQPSEYGSYRFPPWAELLGILMGLLSCLMIPAGMLVAVLREEGSLWERLQQASRPAMDWGPSLEENRTGMYVATLAGSQSPKPLMVHMRKGTSARGLLYARMTVSATYIRSTDKMLSCLQGAHSSAETCLGDFKPEICGEEVTVVG

SEQ ID NO: 36063 - protein, 629 aa, Homo sapiens
  REGION 1..629: note = ENSP00000370128
MGCKVLLNIGQQMLRRKVVDCSREETRLSRCLNTFDLVALGVGSTLGAGVYVLAGAVARENAGPAIVISFLIAALASVLAGLCYGEFGARVPKTGSAYLYSYVTVGELWAFITGWNLILSYIIGTSSVARAWSATFDELIGRPIGEFSRTHMTLNAPGVLAENPDIFAVIIILILTGLLTLGVKESAMVNKIFTCINVLVLGFIMVSGFVKGSVKNWQLTEEDFGNTSGRLCLNNDTKEGKPGVGGFMPFGFSGVLSGAATCFYAFVGFDCIATTGEEVKNPQKAIPVGIVASLLICFIAYFGVSAALTLMMPYFCLDNNSPLPDAFKHVGWEGAKYAVAVGSLCALSASLLGSMFPMPRVIYAMAEDGLLFKFLANVNDRTKTPIIATLASGAVAAVMAFLFDLKDLVDLMSIGTLLAYSLVAACVLVLRYQPEQPNLVYQMASTSDELDPADQNELASTNDSQLGFLPEAEMFSLKTILSPKNMEPSKISGLIVNISTSLIAVLIITFCIVTVLGREALTKGALWAVFLLAGSALLCAVVTGVIWRQPESKTKLSFKVPFLPVLPILSIFVNVYLMMQLDQGTWVRFAVWMLIGFIIYFGYGLWHSEEASLDADQARTPDGNLDQCK

SEQ ID NO: 36064 - protein, 121 aa, Homo sapiens
  REGION 1..121: note = ENSP00000390092
MGCKVLLNIGQQMLRRKVVDCSREETRLSRCLNTFDLVALGVGSTLGAGVYVLAGAVARENAGPAIVISFLIAALASVLAGLCYGEFGARVPKTGSAYLYSYVTVGELWAFITGWNLILSY

SEQ ID NO: 36065 - protein, 523 aa, Homo sapiens
  REGION 1..523: note = ENSP00000253188
MAGHTQQPSGRGNPRPAPSPSPVPGTVPGASERVALKKEIGLLSACTIIIGNIIGSGIFISPKGVLEHSGSVGLALFVWVLGGGVTALGSLCYAELGVAIPKSGGDYAYVTEIFGGLAGFLLLWSAVLIMYPTSLAVISMTFSNYVLQPVFPNCIPPTTASRVLSMACLMLLTWVNSSSVRWATRIQDMFTGGKLLALSLIIGVGLLQIFQGHFEELRPSNAFAFWMTPSVGHLALAFLQGSFAFSGWNFLNYVTEEMVDARKNLPRAIFISIPLVTFVYTFTNIAYFTAMSPQELLSSNAVAVTFGEKLLGYFSWVMPVSVALSTFGGINGYLFTYSRLCFSGAREGHLPSLLAMIHVRHCTPIPALLVCCGATAVIMLVGDTYTLINYVSFINYLCYGVTILGLLLLRWRRPALHRPIKVNLLIPVAYLVFWAFLLVFSFISEPMVCGVGVIIILTGVPIFFLGVFWRSKPKCVHRLTESMTHWGQELCFVVYPQDAPEEEENGPCPPSLLPATDKPSKPQ

SEQ ID NO: 36066 - protein, 389 aa, Homo sapiens
  REGION 1..389: note = ENSP00000465421
MAGHTQQPSGRGNPRPAPSPSPVPGTVPGASERVALKKEIGLLSACTIIIGNIIGSGIFISPKGVLEHSGSVGLALFVWVLGGGVTALGSLCYAELGVAIPKSGGDYAYVTEIFGGLAGFLLLWSAVLIMYPTSLAVISMTFSNYVLQPVFPNCIPPTTASRVLSMACLMLLTWVNSSSVRWATRIQDMFTGGKLLALSLIIGVGLLQIFQGHFEELRPSNAFAFWMTPSVGHLALAFLQGSFAFSGWNFLNYVTEEMVDARKNLPRAIFISIPLVTFVYTFTNIAYFTAMSPQELLSSNAVAVTFGEKLLGYFSWVMPVSVALSTFGGINGYLFTYSSAGPQPSSCSWATRTRSSTMCPSSTTSATASPSWACCCCAGGGLHSTGPSR

SEQ ID NO: 36067 - protein, 71 aa, Homo sapiens
  REGION 1..71: note = ENSP00000466876
MAGHTQQPSGRGNPRPAPSPSPVPGTVPGASERVALKKEIGLLSACTIIIAFCCSGAPSSSCTPPALLSSP

SEQ ID NO: 36068 - protein, 71 aa, Homo sapiens; identical to SEQ ID NO: 36067
  REGION 1..71: note = ENSP00000466410

SEQ ID NO: 36069 - protein, 75 aa, Homo sapiens
  REGION 1..75: note = ENSP00000424046
AILIIIVPGVMQLIKGQTQNFKDAFSGRDSSITRLPLAFYYGMYAYAGWFYLNFVTEEVENPEKPFLSGYWEISH

SEQ ID NO: 36070 - protein, 501 aa, Homo sapiens
  REGION 1..501: note = ENSP00000280612
MVRKPVVSTISKGGYLQGNVNGRLPSLGNKEPPGQEKVQLKRKVTLLRGVSIIIGTIIGAGIFISPKGVLQNTGSVGMSLTIWTVCGVLSLFGALSYAELGTTIKKSGGHYTYILEVFGPLPAFVRVWVELLIIRPAATAVISLAFGRYILEPFFIQCEIPELAIKLITAVGITVVMVLNSMSVSWSARIQIFLTFCKLTAILIIIVPGVMQLIKGQTQNFKDAFSGRDSSITRLPLAFYYGMYAYAGWFYLNFVTEEVENPEKTIPLAICISMAIVTIGYVLTNVAYFTTINAEELLLSNAVAVTFSERLLGNFSLAVPIFVALSCFGSMNGGVFAVSRLFYVASREGHLPEILSMIHVRKHTPLPAVIVLHPLTMIMLFSGDLDSLLNFLSFARWLFIGLAVAGLIYLRYKCPDMHRPFKVPLFIPALFSFTCLFMVALSLYSDPFSTGIGFVITLTGVPAYYLFIIWDKKPRWFRIMSEKITRTLQIILEVVPEEDKL

SEQ ID NO: 36071 - protein, 771 aa, Homo sapiens
  REGION 1..771: note = ENSP00000231706
MSGFFTSLDPRRVQWGAAWYAMHSRILRTKPVESMLEGTGTTTAHGTKLAQVLTTVDLISLGVGSCVGTGMYVVSGLVAKEMAGPGVIVSFIIAAVASILSGVCYAEFGVRVPKTTGSAYTYSYVTVGEFVAFFIGWNLILEYLIGTAAGASALSSMFDSLANHTISRWMADSVGTLNGLGKGEESYPDLLALLIAVIVTIIVALGVKNSIGFNNVLNVLNLAVWVFIMIAGLFFINGKYWAEGQFLPHGWSGVLQGAATCFYAFIGFDIIATTGEEAKNPNTSIPYAITASLVICLTAYVSVSVILTLMVPYYTIDTESPLMEMFVAHGFYAAKFVVAIGSVAGLTVSLLGSLFPMPRVIYAMAGDGLLFRFLAHVSSYTETPVVACIVSGFLAALLALLVSLRDLIEMMSIGTLLAYTLVSVCVLLLRYQPESDIDGFVKFLSEEHTKKKEGILADCEKEACSPVSEGDEFSGPATNTCGAKNLPSLGDNEMLIGKSDKSTYNVNHPNYGTVDMTTGIEADESENIYLIKLKKLIGPHYYTMRIRLGLPGKMDRPTAATGHTVTICVLLLFILMFIFCSFIIFGSDYISEQSWWAILLVVLMVLLISTLVFVILQQPENPKKLPYMAPCLPFVPAFAMLVNIYLMLKLSTITWIRFAVWCFVGLLIYFGYGIWNSTLEISAREEALHQSTYQRYDVDDPFSVEEGFSYATEGESQEDWGGPTEDKGFYYQQMSDAKANGRTSSKAKSKSKHKQNSEALIANDELDYSPE

SEQ ID NO: 36072 - protein, 619 aa, Homo sapiens
  REGION 1..619: note = ENSP00000363417
MPWQAFRRFGQKLVRRRTLESGMAETRLARCLSTLDLVALGVGSTLGAGVYVLAGEVAKDKAGPSIVICFLVAALSSVLAGLCYAEFGARVPRSGSAYLYSYVTVGELWAFTTGWNLILSYVIGTASVARAWSSAFDNLIGNHISKTLQGSIALHVPHVLAEYPDFFALGLVLLLTGLLALGASESALVTKVFTGVNLLVLGFVMISGFVKGDVHNWKLTEEDYELAMAELNDTYSLGPLGSGGFVPFGFEGILRGAATCFYAFVGFDCIATTGEEAQNPQRSIPMGIVISLSVCFLAYFAVSSALTLMMPYYQLQPESPLPEAFLYIGWAPARYVVAVGSLCALSTSLLGSMFPMPRVIYAMAEDGLLFRVLARIHTGTRTPIIATVVSGIIAAFMAFLFKLTDLVDLMSIGTLLAYSLVSICVLILRYQPDQETKTGEEVELQEEAITTESEKLTLWGLFFPLNSIPTPLSGQIVYVCSSLLAVLLTALCLVLAQWSVPLLSGDLLWTAVVVLLLLLIIGIIVVIWRQPQSSTPLHFKVPALPLLPLMSIFVNIYLMMQMTAGTWARFGVWMLIGFAIYFGYGIQHSLEEIKSNQPSRKSRAKTVDLDPGTLYVHSV

SEQ ID NO: 36073 - protein, 619 aa, Homo sapiens; identical to SEQ ID NO: 36072
  REGION 1..619: note = ENSP00000298085

SEQ ID NO: 36074 - protein, 241 aa, Homo sapiens
  REGION 1..241: note = ENSP00000454323
MINPYRNLPLAIIISLPIVTLVYVLTNLAYFTTLSTEQMLSSEAVAVDFGNYHLGVMSWIIPVFVGLSCFGSVNGSLFTSSRLFFVGSREGHLPSILSMIHPQLLTPVPSLVFTCVMTLLYAFSKDIFSVINFFSFFNWLCVALAIIGMIWLRHRKPELERPIKVNLALPVFFILACLFLIAVSFWKTPVECGIGFTIILSGLPVYFFGVWWKNKPKWLLQGIFSTTVLCQKLMQVVPQET

SEQ ID NO: 36075 - protein, 507 aa, Homo sapiens
  REGION 1..507: note = ENSP00000261622
MAGAGPKRRALAAPAAEEKEEAREKMLAAKSADGSAPAGEGEGVTLQRNITLLNGVAIIVGTIIGSGIFVTPTGVLKEAGSPGLALVVWAACGVFSIVGALCYAELGTTISKSGGDYAYMLEVYGSLPAFLKLWIELLIIRPSSQYIVALVFATYLLKPLFPTCPVPEEAAKLVACLCVLLLTAVNCYSVKAATRVQDAFAAAKLLALALIILLGFVQIGKGDVSNLDPNFSFEGTKLDVGNIVLALYSGLFAYGGWNYLNFVTEEMINPYRNLPLAIIISLPIVTLVYVLTNLAYFTTLSTEQMLSSEAVAVDFGNYHLGVMSWIIPVFVGLSCFGSVNGSLFTSSRLFFVGSREGHLPSILSMIHPQLLTPVPSLVFTCVMTLLYAFSKDIFSVINFFSFFNWLCVALAIIGMIWLRHRKPELERPIKVNLALPVFFILACLFLIAVSFWKTPVECGIGFTIILSGLPVYFFGVWWKNKPKWLLQGIFSTTVLCQKLMQVVPQET

SEQ ID NO: 36076 - protein, 937 aa, Homo sapiens
  REGION 1..937: note = ENSP00000383886
MYNMRRLSLSPTFSMGFHLLVTVSLLFSHVDHVIAETEMEGEGNETGECTGSYYCKKGVILPIWEPQDPSFGDKIARATVYFVAMVYMFLGVSIIADRFMSSIEVITSQEKEITIKKPNGETTKTTVRIWNETVSNLTLMALGSSAPEILLSVIEVCGHNFTAGDLGPSTIVGSAAFNMFIIIALCVYVVPDGETRKIKHLRVFFVTAAWSIFAYTWLYIILSVISPGVVEVWEGLLTFFFFPICVVFAWVADRRLLFYKYVYKRYRAGKQRGMIIEHEGDRPSSKTEIEMDGKVVNSHVENFLDGALVLEVDERDQDDEEARREMARILKELKQKHPDKEIEQLIELANYQVLSQQQKSRAFYRIQATRLMTGAGNILKRHAADQARKAVSMHEVNTEVTENDPVSKIFFEQGTYQCLENCGTVALTIIRRGGDLTNTVFVDFRTEDGTANAGSDYEFTEGTVVFKPGDTQKEIRVGIIDDDIFEEDENFLVHLSNVKVSSEASEDGILEANHVSTLACLGSPSTATVTIFDDDHAGIFTFEEPVTHVSESIGIMEVKVLRTSGARGNVIVPYKTIEGTARGGGEDFEDTCGELEFQNDEIVKIITIRIFDREEYEKECSFSLVLEEPKWIRRGMKGGFTITDEYDDKQPLTSKEEEERRIAEMGRPILGEHTKLEVIIEESYEFKSTVDKLIKKTNLALVVGTNSWREQFIEAITVSAGEDDDDDECGEEKLPSCFDYVMHFLTVFWKVLFAFVPPTEYWNGWACFIVSILMIGLLTAFIGDLASHFGCTIGLKDSVTAVVFVALGTSVPDTFASKVAATQDQYADASIGNVTGSNAVNVFLGIGVAWSIAAIYHAANGEQFKVSPGTLAFSVTLFTIFAFINVGVLLYRRRPEIGGELGGPRTAKLLTSCLFVLLWLLYIFFSSLEAYCHIKGF

SEQ ID NO: 36077 - protein, 664 aa, Homo sapiens
  REGION 1..664: note = ENSP00000386116
MRRLSLSPTFSMGFHLLVTVSLLFSHVDHVIAETEMEGEGNETGECTGSYYCKKGVILPIWEPQDPSFGDKIARATVYFVAMVYMFLGVSIIADRFMSSIEVITSQEKEITIKKPNGETTKTTVRIWNETVSNLTLMALGSSAPEILLSVIEVCGHNFTAGDLGPSTIVGSAAFNMFIIIALCVYVVPDGETRKIKHLRVFFVTAAWSIFAYTWLYIILSVISPGVVEVWEGLLTFFFFPICVVFAWVADRRLLFYKYVYKRYRAGKQRGMIIEHEGDRPSSKTEIEMDGKVVNSHVENFLDGALVLEVDERDQDDEEARREMARILKELKQKHPDKEIEQLIELANYQVLSQQQKSRAFYRIQATRLMTGAGNILKRHAADQARKAVSMHEVNTEVTENDPVSKIFFEQGTYQCLENCGTVALTIIRRGGDLTNTVFVDFRTEDGTANAGSDYEFTEGTVVFKPGDTQKEIRVGIIDDDIFEEDENFLVHLSNVKVSSEASEDGILEANHVSTLACLGSPSTATVTIFDDDHAGIFTFEEPVTHVSESIGIMEVKVLRTSGARGNVIVPYKTIEGTARGGGEDFEDTCGELEFQNDEIVKTISVKVIDDEEYEKNKTFFLEIGEPRLVEMSEKKGRSLPLEYLTVRNMRKSAVSPLCLRNQNG

SEQ ID NO: 36078 - protein, 973 aa, Homo sapiens
  REGION 1..973: note = ENSP00000384763
MYNMRRLSLSPTFSMGFHLLVTVSLLFSHVDHVIAETEMEGEGNETGECTGSYYCKKGVILPIWEPQDPSFGDKIARATVYFVAMVYMFLGVSIIADRFMSSIEVITSQEKEITIKKPNGETTKTTVRIWNETVSNLTLMALGSSAPEILLSVIEVCGHNFTAGDLGPSTIVGSAAFNMFIIIALCVYVVPDGETRKIKHLRVFFVTAAWSIFAYTWLYIILSVISPGVVEVWEGLLTFFFFPICVVFAWVADRRLLFYKYVYKRYRAGKQRGMIIEHEGDRPSSKTEIEMDGKVVNSHVENFLDGALVLEVDERDQDDEEARREMARILKELKQKHPDKEIEQLIELANYQVLSQQQKSRAFYRIQATRLMTGAGNILKRHAADQARKAVSMHEVNTEVTENDPVSKIFFEQGTYQCLENCGTVALTIIRRGGDLTNTVFVDFRTEDGTANAGSDYEFTEGTVVFKPGDTQKEIRVGIIDDDIFEEDENFLVHLSNVKVSSEASEDGILEANHVSTLACLGSPSTATVTIFDDDHAGIFTFEEPVTHVSESIGIMEVKVLRTSGARGNVIVPYKTIEGTARGGGEDFEDTCGELEFQNDEIVKTISVKVIDDEEYEKNKTFFLEIGEPRLVEMSEKKALLLNELGGFTITGKYLFGQPVFRKVHAREHPILSTVITIADEYDDKQPLTSKEEEERRIAEMGRPILGEHTKLEVIIEESYEFKSTVDKLIKKTNLALVVGTNSWREQFIEAITVSAGEDDDDDECGEEKLPSCFDYVMHFLTVFWKVLFAFVPPTEYWNGWACFIVSILMIGLLTAFIGDLASHFGCTIGLKDSVTAVVFVALGTSVPDTFASKVAATQDQYADASIGNVTGSNAVNVFLGIGVAWSIAAIYHAANGEQFKVSPGTLAFSVTLFTIFAFINVGVLLYRRRPEIGGELGGPRTAKLLTSCLFVLLWLLYIFFSSLEAYCHIKGF

SEQ ID NO: 36079 - protein, 968 aa, Homo sapiens
  REGION 1..968: note = ENSP00000385678
MYNMRRLSLSPTFSMGFHLLVTVSLLFSHVDHVIAETEMEGEGNETGECTGSYYCKKGVILPIWEPQDPSFGDKIARATVYFVAMVYMFLGVSIIADRFMSSIEVITSQEKEITIKKPNGETTKTTVRIWNETVSNLTLMALGSSAPEILLSVIEVCGHNFTAGDLGPSTIVGSAAFNMFIIIALCVYVVPDGETRKIKHLRVFFVTAAWSIFAYTWLYIILSVISPGVVEVWEGLLTFFFFPICVVFAWVADRRLLFYKYVYKRYRAGKQRGMIIEHEGDRPSSKTEIEMDGKVVNSHVENFLDGALVLEVDERDQDDEEARREMARILKELKQKHPDKEIEQLIELANYQVLSQQQKSRAFYRIQATRLMTGAGNILKRHAADQARKAVSMHEVNTEVTENDPVSKIFFEQGTYQCLENCGTVALTIIRRGGDLTNTVFVDFRTEDGTANAGSDYEFTEGTVVFKPGDTQKEIRVGIIDDDIFEEDENFLVHLSNVKVSSEASEDGILEANHVSTLACLGSPSTATVTIFDDDHAGIFTFEEPVTHVSESIGIMEVKVLRTSGARGNVIVPYKTIEGTARGGGEDFEDTCGELEFQNDEIVKTISVKVIDDEEYEKNKTFFLEIGEPRLVEMSEKKALLLNELGGFTITGQPVFRKVHAREHPILSTVITIADEYDDKQPLTSKEEEERRIAEMGRPILGEHTKLEVIIEESYEFKSTVDKLIKKTNLALVVGTNSWREQFIEAITVSAGEDDDDDECGEEKLPSCFDYVMHFLTVFWKVLFAFVPPTEYWNGWACFIVSILMIGLLTAFIGDLASHFGCTIGLKDSVTAVVFVALGTSVPDTFASKVAATQDQYADASIGNVTGSNAVNVFLGIGVAWSIAAIYHAANGEQFKVSPGTLAFSVTLFTIFAFINVGVLLYRRRPEIGGELGGPRTAKLLTSCLFVLLWLLYIFFSSLEAYCHIKGF

SEQ ID NO: 36080 - protein, 937 aa, Homo sapiens; identical to SEQ ID NO: 36076
  REGION 1..937: note = ENSP00000385188

SEQ ID NO: 36081 - protein, 937 aa, Homo sapiens; identical to SEQ ID NO: 36076
  REGION 1..937: note = ENSP00000385535

SEQ ID NO: 36082 - protein, 965 aa, Homo sapiens
  REGION 1..965: note = ENSP00000384908
MYNMRRLSLSPTFSMGFHLLVTVSLLFSHVDHVIAETEMEGEGNETGECTGSYYCKKGVILPIWEPQDPSFGDKIARATVYFVAMVYMFLGVSIIADRFMSSIEVITSQEKEITIKKPNGETTKTTVRIWNETVSNLTLMALGSSAPEILLSVIEVCGHNFTAGDLGPSTIVGSAAFNMFIIIALCVYVVPDGETRKIKHLRVFFVTAAWSIFAYTWLYIILSVISPGVVEVWEGLLTFFFFPICVVFAWVADRRLLFYKYVYKRYRAGKQRGMIIEHEGDRPSSKTEIEMDGKVVNSHVENFLDGALVLEVDERDQDDEEARREMARILKELKQKHPDKEIEQLIELANYQVLSQQQKSRAFYRIQATRLMTGAGNILKRHAADQARKAVSMHEVNTEVTENDPVSKIFFEQGTYQCLENCGTVALTIIRRGGDLTNTVFVDFRTEDGTANAGSDYEFTEGTVVFKPGDTQKEIRVGIIDDDIFEEDENFLVHLSNVKVSSEASEDGILEANHVSTLACLGSPSTATVTIFDDDHAGIFTFEEPVTHVSESIGIMEVKVLRTSGARGNVIVPYKTIEGTARGGGEDFEDTCGELEFQNDEIVKIITIRIFDREEYEKECSFSLVLEEPKWIRRGMKGGFTITGKYLFGQPVFRKVHAREHPILSTVITIADEYDDKQPLTSKEEEERRIAEMGRPILGEHTKLEVIIEESYEFKSTVDKLIKKTNLALVVGTNSWREQFIEAITVSAGEDDDDDECGEEKLPSCFDYVMHFLTVFWKVLFAFVPPTEYWNGWACFIVSILMIGLLTAFIGDLASHFGCTIGLKDSVTAVVFVALGTSVPDTFASKVAATQDQYADASIGNVTGSNAVNVFLGIGVAWSIAAIYHAANGEQFKVSPGTLAFSVTLFTIFAFINVGVLLYRRRPEIGGELGGPRTAKLLTSCLFVLLWLLYIFFSSLEAYCHIKGF

SEQ ID NO: 36083 - protein, 87 aa, Homo sapiens
  REGION 1..87: note = ENSP00000389330
MYNMRRLSLSPTFSMGFHLLVTVSLLFSHVDHVIAETEMEGEGNETGECTGSYYCKKGVILPIWEPQDPSFGDKIARATVYFVAMVY

SEQ ID NO: 36084 - protein, 87 aa, Homo sapiens; identical to SEQ ID NO: 36083
  REGION 1..87: note = ENSP00000398575

SEQ ID NO: 36085 - protein, 73 aa, Homo sapiens
  REGION 1..73: note = ENSP00000412560
MYNMRRLSLSPTFSMGFHLLVTVSLLFSHVDHVIAETEMEGEGNETGECTGSYYCKKGVILPIWEPQDPSFGD

SEQ ID NO: 36086 - protein, 973 aa, Homo sapiens; identical to SEQ ID NO: 36078
  REGION 1..973: note = ENSP00000332931

SEQ ID NO: 36087 - protein, 937 aa, Homo sapiens; identical to SEQ ID NO: 36076
  REGION 1..937: note = ENSP00000385811

SEQ ID NO: 36088 - protein, 921 aa, Homo sapiens
  REGION 1..921: note = ENSP00000236877
MAPLALVGVTLLLAAPPCSGAATPTPSLPPPPANDSDTSTGGCQGSYRCQPGVLLPVWEPDDPSLGDKAARAVVYFVAMVYMFLGVSIIADRFMAAIEVITSKEKEITITKANGETSVGTVRIWNETVSNLTLMALGSSAPEILLSVIEVCGHNFQAGELGPGTIVGSAAFNMFVVIAVCIYVIPAGESRKIKHLRVFFVTASWSIFAYVWLYLILAVFSPGVVQVWEALLTLVFFPVCVVFAWMADKRLLFYKYVYKRYRTDPRSGIIIGAEGDPPKSIELDGTFVGAEAPGELGGLGPGPAEARELDASRREVIQILKDLKQKHPDKDLEQLVGIANYYALLHQQKSRAFYRIQATRLMTGAGNVLRRHAADASRRAAPAEGAGEDEDDGASRIFFEPSLYHCLENCGSVLLSVTCQGGEGNSTFYVDYRTEDGSAKAGSDYEYSEGTLVFKPGETQKELRIGIIDDDIFEEDEHFFVRLLNLRVGDAQGMFEPDGGGRPKGRLVAPLLATVTILDDDHAGIFSFQDRLLHVSECMGTVDVRVVRSSGARGTVRLPYRTVDGTARGGGVHYEDACGELEFGDDETMKTLQVKIVDDEEYEKKDNFFIELGQPQWLKRGISALLLNQGDGDRKLTAEEEEARRIAEMGKPVLGENCRLEVIIEESYDFKNTVDKLIKKTNLALVIGTHSWREQFLEAITVSAGDEEEEEDGSREERLPSCFDYVMHFLTVFWKVLFACVPPTEYCHGWACFGVSILVIGLLTALIGDLASHFGCTVGLKDSVNAVVFVALGTSIPDTFASKVAALQDQCADASIGNVTGSNAVNVFLGLGVAWSVAAVYWAVQGRPFEVRTGTLAFSVTLFTVFAFVGIAVLLYRRRPHIGGELGGPRGPKLATTALFLGLWLLYILFASLEAYCHIRGF

SEQ ID NO: 36089 - protein, 677 aa, Homo sapiens
  REGION 1..677: note = ENSP00000437536
MADKRLLFYKYVYKRYRTDPRSGIIIGAEGDPPKSIELDGTFVGAEAPGELGGLGPGPAEARELDASRREVIQILKDLKQKHPDKDLEQLVGIANYYALLHQQKSRAFYRIQATRLMTGAGNVLRRHAADASRRAAPAEGAGEDEDDGASRIFFEPSLYHCLENCGSVLLSVTCQGGEGNSTFYVDYRTEDGSAKAGSDYEYSEGTLVFKPGETQKELRIGIIDDDIFEEDEHFFVRLLNLRVGDAQGMFEPDGGGRPKGRLVAPLLATVTILDDDHAGIFSFQDRLLHVSECMGTVDVRVVRSSGARGTVRLPYRTVDGTARGGGVHYEDACGELEFGDDETMKTLQVKIVDDEEYEKKDNFFIELGQPQWLKRGISALLLNQGDGDRKLTAEEEEARRIAEMGKPVLGENCRLEVIIEESYDFKNTVDKLIKKTNLALVIGTHSWREQFLEAITVSAGDEEEEEDGSREERLPSCFDYVMHFLTVFWKVLFACVPPTEYCHGWACFGVSILVIGLLTALIGDLASHFGCTVGLKDSVNAVVFVALGTSIPDTFASKVAALQDQCADASIGNVTGSNAVNVFLGLGVAWSVAAVYWAVQGRPFEVRTGTLAFSVTLFTVFAFVGIAVLLYRRRPHIGGELGGPRGPKLATTALFLGLWLLYILFASLEAYCHIRGF

SEQ ID NO: 36090 - protein, 159 aa, Homo sapiens
  REGION 1..159: note = ENSP00000472233
MAAIEVITSKEKEITITKANGETSVGTVRIWNETVSNLTLMALGSSAPEILLSVIEVCGHNFQAGELGPGTIVGSAAFNMFVVIAVCIYVIPAGESRKIKHLRVFFVTASWSIFAYVWLYLILAVFSPGVVQVWEALLTLVFFPVCVVFAWMADKRLLF

SEQ ID NO: 36091 - protein, 145 aa, Homo sapiens
  REGION 1..145: note = ENSP00000472208
MVYMFLGVSIIADRFMAAIEVITSKEKEITITKANGETSVGTVRIWNETVSNLTLMALGSSAPEILLSVIEVCGHNFQAGELGPGTIVGSAAFNMFVVIAVCIYVIPAGESRKIKHLRVFFVTASWSIFAYVWLYLILAVFSPGV

SEQ ID NO: 36092 - protein, 921 aa, Homo sapiens
  REGION 1..921: note = ENSP00000349392
MAWLRLQPLTSAFLHFGLVTFVLFLNGLRAEAGGSGDVPSTGQNNESCSGSSDCKEGVILPIWYPENPSLGDKIARVIVYFVALIYMFLGVSIIADRFMASIEVITSQEREVTIKKPNGETSTTTIRVWNETVSNLTLMALGSSAPEILLSLIEVCGHGFIAGDLGPSTIVGSAAFNMFIIIGICVYVIPDGETRKIKHLRVFFITAAWSIFAYIWLYMILAVFSPGVVQVWEGLLTLFFFPVCVLLAWVADKRLLFYKYMHKKYRTDKHRGIIIETEGDHPKGIEMDGKMMNSHFLDGNLVPLEGKEVDESRREMIRILKDLKQKHPEKDLDQLVEMANYYALSHQQKSRAFYRIQATRMMTGAGNILKKHAAEQAKKASSMSEVHTDEPEDFISKVFFDPCSYQCLENCGAVLLTVVRKGGDMSKTMYVDYKTEDGSANAGADYEFTEGTVVLKPGETQKEFSVGIIDDDIFEEDEHFFVRLSNVRIEEEQPEEGMPPAIFNSLPLPRAVLASPCVATVTILDDDHAGIFTFECDTIHVSESIGVMEVKVLRTSGARGTVIVPFRTVEGTAKGGGEDFEDTYGELEFKNDETVKTIRVKIVDEEEYERQENFFIALGEPKWMERGISDVTDRKLTMEEEEAKRIAEMGKPVLGEHPKLEVIIEESYEFKTTVDKLIKKTNLALVVGTHSWRDQFMEAITVSAAGDEDEDESGEERLPSCFDYVMHFLTVFWKVLFACVPPTEYCHGWACFAVSILIIGMLTAIIGDLASHFGCTIGLKDSVTAVVFVAFGTSVPDTFASKAAALQDVYADASIGNVTGSNAVNVFLGIGLAWSVAAIYWALQGQEFHVSAGTLAFSVTLFTIFAFVCISVLLYRRRPHLGGELGGPRGCKLATTWLFVSLWLLYILFATLEAYCYIKGF

SEQ ID NO: 36093 - protein, 620 aa, Homo sapiens
  REGION 1..620: note = ENSP00000436332
MAWLRLQPLTSAFLHFGLVTFVLFLNGLRAEAGGSGDVPSTGQNNESCSGSSDCKEGVILPIWYPENPSLGDKIARVIVYFVALIYMFLGVSIIADRFMASIEVITSQEREVTIKKPNGETSTTTIRVWNETVSNLTLMALGSSAPEILLSLIEVCGHGFIAGDLGPSTIVGSAAFNMFIIIGICVYVIPDGETRKIKHLRVFFITAAWSIFAYIWLYMILAVFSPGVVQVWEGLLTLFFFPVCVLLAWVADKRLLFYKYMHKKYRTDKHRGIIIETEGDHPKGIEMDGKMMNSHFLDGNLVPLEGKEVDESRREMIRILKDLKQKHPEKDLDQLVEMANYYALSHQQKSRAFYRIQATRMMTGAGNILKKHAAEQAKKASSMSEVHTDEPEDFISKVFFDPCSYQCLENCGAVLLTVVRKGGDMSKTMYVDYKTEDGSANAGADYEFTEGTVVLKPGETQKEFSVGIIDDDIFEEDEHFFVRLSNVRIEEEQPEEGMPPAIFNSLPLPRAVLASPCVATVTILDDDHAGIFTFECDTIHVSESIGVMEVKVLRTSGARGTVIVPFRTVEGTAKGGGEDFEDTYGELEFKNDETVCDRQEADYGRRGGQEDSRDGKASIG

SEQ ID NO: 36094 - protein, 927 aa, Homo sapiens
  REGION 1..927: note = ENSP00000370669
MAWLRLQPLTSAFLHFGLVTFVLFLNGLRAEAGGSGDVPSTGQNNESCSGSSDCKEGVILPIWYPENPSLGDKIARVIVYFVALIYMFLGVSIIADRFMASIEVITSQEREVTIKKPNGETSTTTIRVWNETVSNLTLMALGSSAPEILLSLIEVCGHGFIAGDLGPSTIVGSAAFNMFIIIGICVYVIPDGETRKIKHLRVFFITAAWSIFAYIWLYMILAVFSPGVVQVWEGLLTLFFFPVCVLLAWVADKRLLFYKYMHKKYRTDKHRGIIIETEGDHPKGIEMDGKMMNSHFLDGNLVPLEGKEVDESRREMIRILKDLKQKHPEKDLDQLVEMANYYALSHQQKSRAFYRIQATRMMTGAGNILKKHAAEQAKKASSMSEVHTDEPEDFISKVFFDPCSYQCLENCGAVLLTVVRKGGDMSKTMYVDYKTEDGSANAGADYEFTEGTVVLKPGETQKEFSVGIIDDDIFEEDEHFFVRLSNVRIEEEQPEEGMPPAIFNSLPLPRAVLASPCVATVTILDDDHAGIFTFECDTIHVSESIGVMEVKVLRTSGARGTVIVPFRTVEGTAKGGGEDFEDTYGELEFKNDETVKTIRVKIVDEEEYERQENFFIALGEPKWMERGISALLLSPDVTDRKLTMEEEEAKRIAEMGKPVLGEHPKLEVIIEESYEFKTTVDKLIKKTNLALVVGTHSWRDQFMEAITVSAAGDEDEDESGEERLPSCFDYVMHFLTVFWKVLFACVPPTEYCHGWACFAVSILIIGMLTAIIGDLASHFGCTIGLKDSVTAVVFVAFGTSVPDTFASKAAALQDVYADASIGNVTGSNAVNVFLGIGLAWSVAAIYWALQGQEFHVSAGTLAFSVTLFTIFAFVCISVLLYRRRPHLGGELGGPRGCKLATTWLFVSLWLLYILFATLEAYCYIKGF

SEQ ID NO: 36095 - protein, 298 aa, Homo sapiens
  REGION 1..298: note = ENSP00000216568
MERGISDVTDRKLTMEEEEAKRIAEMGKPVLGEHPKLEVIIEESYEFKTTVDKLIKKTNLALVVGTHSWRDQFMEAITVSAAGDEDEDESGEERLPSCFDYVMHFLTVFWKVLFACVPPTEYCHGWACFAVSILIIGMLTAIIGDLASHFGCTIGLKDSVTAVVFVAFGTSVPDTFASKAAALQDVYADASIGNVTGSNAVNVFLGIGLAWSVAAIYWALQGQEFHVSAGTLAFSVTLFTIFAFVCISVLLYRRRPHLGGELGGPRGCKLATTWLFVSLWLLYILFATLEAYCYIKGF

SEQ ID NO: 36096 - protein, 284 aa, Homo sapiens
  REGION 1..284: note = ENSP00000377863
MEEEEAKRIAEMGKPVLGEHPKLEVIIEESYEFKTTVDKLIKKTNLALVVGTHSWRDQFMEAITVSAAGDEDEDESGEERLPSCFDYVMHFLTVFWKVLFACVPPTEYCHGWACFAVSILIIGMLTAIIGDLASHFGCTIGLKDSVTAVVFVAFGTSVPDTFASKAAALQDVYADASIGNVTGSNAVNVFLGIGLAWSVAAIYWALQGQEFHVSAGTLAFSVTLFTIFAFVCISVLLYRRRPHLGGELGGPRGCKLATTWLFVSLWLLYILFATLEAYCYIKGF

SEQ ID NO: 36097 - protein, 924 aa, Homo sapiens
  REGION 1..924: note = ENSP00000436688
MAWLRLQPLTSAFLHFGLVTFVLFLNGLRAEAGGSGDVPSTGQNNESCSGSSDCKEGVILPIWYPENPSLGDKIARVIVYFVALIYMFLGVSIIADRFMASIEVITSQEREVTIKKPNGETSTTTIRVWNETVSNLTLMALGSSAPEILLSLIEVCGHGFIAGDLGPSTIVGSAAFNMFIIIGICVYVIPDGETRKIKHLRVFFITAAWSIFAYIWLYMILAVFSPGVVQVWEGLLTLFFFPVCVLLAWVADKRLLFYKYMHKKYRTDKHRGIIIETEGDHPKGIEMDGKMMNSHFLDGNLVPLEGKEVDESRREMIRILKDLKQKHPEKDLDQLVEMANYYALSHQQKSRAFYRIQATRMMTGAGNILKKHAAEQAKKASSMSEVHTDEPEDFISKVFFDPCSYQCLENCGAVLLTVVRKGGDMSKTMYVDYKTEDGSANAGADYEFTEGTVVLKPGETQKEFSVGIIDDDIFEEDEHFFVRLSNVRIEEEQPEEGMPPAIFNSLPLPRAVLASPCVATVTILDDDHAGIFTFECDTIHVSESIGVMEVKVLRTSGARGTVIVPFRTVEGTAKGGGEDFEDTYGELEFKNDETVKTIRVKIVDEEEYERQENFFIALGEPKWMERGISALLLSPDRKLTMEEEEAKRIAEMGKPVLGEHPKLEVIIEESYEFKTTVDKLIKKTNLALVVGTHSWRDQFMEAITVSAAGDEDEDESGEERLPSCFDYVMHFLTVFWKVLFACVPPTEYCHGWACFAVSILIIGMLTAIIGDLASHFGCTIGLKDSVTAVVFVAFGTSVPDTFASKAAALQDVYADASIGNVTGSNAVNVFLGIGLAWSVAAIYWALQGQEFHVSAGTLAFSVTLFTIFAFVCISVLLYRRRPHLGGELGGPRGCKLATTWLFVSLWLLYILFATLEAYCYIKGF

SEQ ID NO: 36098 - protein, 925 aa, Homo sapiens
  REGION 1..925: note = ENSP00000433531
MAWLRLQPLTSAFLHFGLVTFVLFLNGLRAEAGGSGDVPSTGQNNESCSGSSDCKEGVILPIWYPENPSLGDKIARVIVYFVALIYMFLGVSIIADRFMASIEVITSQEREVTIKKPNGETSTTTIRVWNETVSNLTLMALGSSAPEILLSLIEVCGHGFIAGDLGPSTIVGSAAFNMFIIIGICVYVIPDGETRKIKHLRVFFITAAWSIFAYIWLYMILAVFSPGVVQVWEGLLTLFFFPVCVLLAWVADKRLLFYKYMHKKYRTDKHRGIIIETEGDHPKGIEMDGKMMNSHFLDGNLVPLEGKEVDESRREMIRILKDLKQKHPEKDLDQLVEMANYYALSHQQKSRAFYRIQATRMMTGAGNILKKHAAEQAKKASSMSEVHTDEPEDFISKVFFDPCSYQCLENCGAVLLTVVRKGGDMSKTMYVDYKTEDGSANAGADYEFTEGTVVLKPGETQKEFSVGIIDDDIFEEDEHFFVRLSNVRIEEEQPEEGMPPAIFNSLPLPRAVLASPCVATVTILDDDHAGIFTFECDTIHVSESIGVMEVKVLRTSGARGTVIVPFRTVEGTAKGGGEDFEDTYGELEFKNDETVKTIHIKVIDDEAYEKNKNYFIEMMGPRMVDMSFQKALLLSPDRKLTMEEEEAKRIAEMGKPVLGEHPKLEVIIEESYEFKTTVDKLIKKTNLALVVGTHSWRDQFMEAITVSAAGDEDEDESGEERLPSCFDYVMHFLTVFWKVLFACVPPTEYCHGWACFAVSILIIGMLTAIIGDLASHFGCTIGLKDSVTAVVFVAFGTSVPDTFASKAAALQDVYADASIGNVTGSNAVNVFLGIGLAWSVAAIYWALQGQEFHVSAGTLAFSVTLFTIFAFVCISVLLYRRRPHLGGELGGPRGCKLATTWLFVSLWLLYILFATLEAYCYIKGF

SEQ ID NO: 36099 - protein, 210 aa, Homo sapiens
  REGION 1..210: note = ENSP00000437103
MEEEEAKRIAEMGKPVLGEHPKLEVIIEESYEFKTTVDKLIKKTNLALVVGTHSWRDQFMEAITVSAAGDEDEDESGEERLPSCFDYVMHFLTVFWKVLFACVPPTEYCHGWACFAVSILIIGMLTAIIGDLASHFGCTIGLKDSVTAVVFVAFGTSVPGESERCLNLQRGFYLVQMTPGLHLIIFHTISDLNLTEPLPLKCTKVNQRDE

SEQ ID NO: 36100 - protein, 925 aa, Homo sapiens; identical to SEQ ID NO: 36098
  REGION 1..925: note = ENSP00000350560

SEQ ID NO: 36101 - protein, 584 aa, Homo sapiens
  REGION 1..584: note = ENSP00000447091
MAGRRLNLRWALSVLCVLLMAETVSGTRGSSTGAHISPQFPASGVNQTPVVDCRKVCGLNVSDRCDFIRTNPDCHSDGGYLDYLEGIFCHFPPSLLPLAVTLYVSWLLYLFLILGVTAAKFFCPNLSAISTTLKLSHNVAGVTFLAFGNGAPDIFSALVAFSDPHTAGLALGALFGAGVLVTTVVAGGITILHPFMAASRPFFRDIVFYMVAVFLTFLMLFRGRVTLAWALGYLGLYVFYVVTVILCTWIYQRQRRGSLFCPMPVTPEILSDSEEDRVSSNTNSYDYGDEYRPLFFYQETTAQILVRALNPLDYMKWRRKSAYWKALKVFKLPVEFLLLLTVPVVDPDKDDQNWKRPLNCLHLVISPLVVVLTLQSGTYGVYEIGGLVPVWVVVVIAGTALASVTFFATSDSQPPRLHWLFAFLGFLTSALWINAAATEVVNILRSLGVVFRLSNTVLGLTLLAWGNSIGDAFSDFTLARQGYPRMAFSACFGGIIFNILVGVGLGCLLQISRSHTEVKLEPDGLLVWVLAGALGLSLVFSLVSVPLQCFQLSRVYGFCLLLFYLNFLVVALLTEFGVIHLKSM

SEQ ID NO: 36102 - protein, 404 aa, Homo sapiens
  REGION 1..404: note = ENSP00000448758
  VARIANT 1: note = Any amino acid
XTLKLSHNVAGVTFLAFGNGAPDIFSALVAFSDPHTAGLALGALFGAGVLVTTVVAGGITILHPFMAASRPFFRDIVFYMVAVFLTFLMLFRGRVTLAWALGYLGLYVFYVVTVILCTWIYQRQRRGSLFCPMPVTPEILSDSEEDRVSSNTNSYDYGDEYRPLFFYQETTAQILVRALNPLDYMKWRRKSAYWKALKVFKLPVEFLLLLTVPVVDPDKDDQNWKRPLNCLHLVISPLVVVLTLQSGTYGVYEIGGLVPVWVVVVIAGTALASVTFFATSDSQPPRLHWLFAFLGFLTSALWINAAATEVVNILRSLGVVFRLSNTVLGLTLLAWGNSIGDAFSDFTLARQGYPRMAFSACFGGIIFNILVGVGLGCLLQISRSHTEVKTRRMQVAGKTKRHGA

SEQ ID NO: 36103 - protein, 99 aa, Homo sapiens
  REGION 1..99: note = ENSP00000447585
MAFSACFGGIIFNILVGVGLGCLLQISRSHTEVKLEPDGLLVWVLAGALGLSLVFSLVSVPLQCFQLSRVYGFCLLLFYLNFLVVALLTEFGVIHLKSM

SEQ ID NO: 36104 - protein, 143 aa, Homo sapiens
  REGION 1..143: note = ENSP00000449519
MTVGENEGVDDQGGWGKRLTTAGPSCSCADAFSDFTLARQGYPRMAFSACFGGIIFNILVGVGLGCLLQISRSHTEVKLEPDGLLVWVLAGALGLSLVFSLVSVPLQCFQLSRVYGFCLLLFYLNFLVVALLTEFGVIHLKSM

SEQ ID NO: 36105 - protein, 528 aa, Homo sapiens
  REGION 1..528: note = ENSP00000450081
MAGRRLNLRWALSVLCVLLMAETVSGTRGSSTGAHISPQFPASGVNQTPVVDCRKVCGLNVSDRCDFIRTNPDCHSDGGYLDYLEGIFCHFPPSLLPLAVTLYVSWLLYLFLILGVTAAKFFCPNLSAISTTLKLSHNVAGVTFLAFGNGAPDIFSALVAFSDPHTAGLALGALFGYLGLYVFYVVTVILCTWIYQRQRRGSLFCPMPVTPEILSDSEEDRVSSNTNSYDYGDEYRPLFFYQETTAQILVRALNPLDYMKWRRKSAYWKALKVFKLPVEFLLLLTVPVVDPDKDDQNWKRPLNCLHLVISPLVVVLTLQSGTYGVYEIGGLVPVWVVVVIAGTALASVTFFATSDSQPPRLHWLFAFLGFLTSALWINAAATEVVNILRSLGVVFRLSNTVLGLTLLAWGNSIGDAFSDFTLARQGYPRMAFSACFGGIIFNILVGVGLGCLLQISRSHTEVKLEPDGLLVWVLAGALGLSLVFSLVSVPLQCFQLSRVYGFCLLLFYLNFLVVALLTEFGVIHLKSM

SEQ ID NO: 36106 - protein, 231 aa, Homo sapiens
  REGION 1..231: note = ENSP00000448703
MAGRRLNLRWALSVLCVLLMAETVSGTRGSSTGAHISPQFPASGVNQTPVVDCRKVCGLNVSDRCDFIRTNPDCHSDGGYLDYLEGIFCHFPPSLLPLAVTLYVSWLLYLFLILGVTAAKFFCPNLSAISTTLKLSHNVAGVTFLAFGNGAPDIFSALVAFSDPHTAGLALGALFGAGVLVTTVVAGGITILHPFMAASRPFFRDIVFYMVAVFLTFLMLFRGRVTLAWAL

SEQ ID NO: 36107 - protein, 53 aa, Homo sapiens
  REGION 1..53: note = ENSP00000448749
MAGRRLNLRWALSVLCVLLMAETVSGTRGSSTGAHISPQFPASVPQGVWPECL

SEQ ID NO: 36108 - protein, 53 aa, Homo sapiens; identical to SEQ ID NO: 36107
  REGION 1..53: note = ENSP00000447502

SEQ ID NO: 36109 - protein, 131 aa, Homo sapiens
  REGION 1..131: note = ENSP00000449448
MAGRRLNLRWALSVLCVLLMAETVSGTRGSSTGAHISPQFPASGVNQTPVVDCRKVCGLNVSDRCDFIRTNPDCHSDGGYLDYLEGIFCHFPPSLLPLAVTLYVSWLLYLFLILGVTAAKFFCPNLSAIST

SEQ ID NO: 36110 - protein, 103 aa, Homo sapiens
  REGION 1..103: note = ENSP00000447972
MAGRRLNLRWALSVLCVLLMAETVSGTRGSSTGAHISPQFPASGVNQTPVVDCRKVCGLNVSDRCDFIRTNPDCHSDGGYLDYLEGIFCHFPPSLLPLAVTLY

SEQ ID NO: 36111 - protein, 584 aa, Homo sapiens; identical to SEQ ID NO: 36101
  REGION 1..584: note = ENSP00000202831

SEQ ID NO: 36112 - protein, 834 aa, Homo sapiens
  REGION 1..834: note = ENSP00000264938
MWGLGARGPDRGLLLALALGGLARAGGVEVEPGGAHGESGGFQVVTFEWAHVQDPYVIALWILVASLAKIGFHLSHKVTSVVPESALLIVLGLVLGGIVWAADHIASFTLTPTVFFFYLLPPIVLDAGYFMPNRLFFGNLGTILLYAVVGTVWNAATTGLSLYGVFLSGLMGDLQIGLLDFLLFGSLMAAVDPVAVLAVFEEVHVNEVLFIIVFGESLLNDAVTVVLYNVFESFVALGGDNVTGVDCVKGIVSFFVVSLGGTLVGVVFAFLLSLVTRFTKHVRIIEPGFVFIISYLSYLTSEMLSLSAILAITFCGICCQKYVKANISEQSATTVRYTMKMLASSAETIIFMFLGISAVNPFIWTWNTAFVLLTLVFISVYRAIGVVLQTWLLNRYRMVQLEPIDQVVLSYGGLRGAVAFALVVLLDGDKVKEKNLFVSTTIIVVFFTVIFQGLTIKPLVQWLKVKRSEHREPRLNEKLHGRAFDHILSAIEDISGQIGHNYLRDKWSHFDRKFLSRVLMRRSAQKSRDRILNVFHELNLKDAISYVAEGERRGSLAFIRSPSTDNVVNVDFTPRSSTVEASVSYLLRENVSAVCLDMQSLEQRRRSIRDAEDMVTHHTLQQYLYKPRQEYKHLYSRHELTPTEDEKQDREIFHRTMRKRLESFKSTKLGLNQNKKAAKLYKRERAQKRRNSSIPNGKLPMESPAQNFTIKEKDLELSDTEEPPNYDEEMSGGIEFLASVTKDTASDSPAGIDNPVFSPDEALDRSLLARLPPWLSPGETVVPSQRARTQIPYSPGTFCRLMPFRLSSKSVDSFLQADGPEERPPAALPESTHM

SEQ ID NO: 36113 - protein, 825 aa, Homo sapiens
  REGION 1..825: note = ENSP00000422983
MWGLGARGPDRGLLLALALGGLARAGGVEVEPGGAHGESGGFQVVTFEWAHVQDPYVIALWILVASLAKIGFHLSHKVTSVVPESALLIVLGLVLGGIVWAADHIASFTLTPTVFFFYLLPPIVLDAGYFMPNRLFFGNLGTILLYAVVGTVWNAATTGLSLYGVFLSGLMGDLQIGLLDFLLFGSLMAAVDPVAVLAVFEEVHVNEVLFIIVFGESLLNDAVTVVLYNVFESFVALGGDNVTGVDCVKGIVSFFVVSLGGTLVGVVFAFLLSLVTRFTKHVRIIEPGFVFIISYLSYLTSEMLSLSAILAITFCGICCQKYVKANISEQSATTVRYTMKMLASSAETIIFMFLGISAVNPFIWTWNTAFVLLTLVFISVYRAIGVVLQTWLLNRYRMVQLEPIDQVVLSYGGLRGAVAFALVVLLDGDKVKEKNLFVSTTIIVVFFTVIFQWLKVKRSEHREPRLNEKLHGRAFDHILSAIEDISGQIGHNYLRDKWSHFDRKFLSRVLMRRSAQKSRDRILNVFHELNLKDAISYVAEGERRGSLAFIRSPSTDNVVNVDFTPRSSTVEASVSYLLRENVSAVCLDMQSLEQRRRSIRDAEDMVTHHTLQQYLYKPRQEYKHLYSRHELTPTEDEKQDREIFHRTMRKRLESFKSTKLGLNQNKKAAKLYKRERAQKRRNSSIPNGKLPMESPAQNFTIKEKDLELSDTEEPPNYDEEMSGGIEFLASVTKDTASDSPAGIDNPVFSPDEALDRSLLARLPPWLSPGETVVPSQRARTQIPYSPGTFCRLMPFRLSSKSVDSFLQADGPEERPPAALPESTHM

SEQ ID NO: 36114 - protein, 70 aa, Homo sapiens
  REGION 1..70: note = ENSP00000486364
MWGLGARGPDRGLLLALALGGLARAGGVEVEPGGAHGESGGFQVVTFEWAHVQDPYVIALWILVASLAKI

SEQ ID NO: 36115 - protein, 70 aa, Homo sapiens; identical to SEQ ID NO: 36114
  REGION 1..70: note = ENSP00000486297

SEQ ID NO: 36116 - protein, 645 aa, Homo sapiens
  REGION 1..645: note = ENSP00000320246
MERQSRVMSEKDEYQFQHQGAVELLVFNFLLILTILTIWLFKNHRFRFLHETGGAMVYGLIMGLILRYATAPTDIESGTVYDCVKLTFSPSTLLVNITDQVYEYKYKREISQHNINPHQGNAILEKMTFDPEIFFNVLLPPIIFHAGYSLKKRHFFQNLGSILTYAFLGTAISCIVIGLIMYGFVKAMIHAGQLKNGDFHFTDCLFFGSLMSATDPVTVLAIFHELHVDPDLYTLLFGESVLNDAVAIVLTYSISIYSPKENPNAFDAAAFFQSVGNFLGIFAGSFAMGSAYAIITALLTKFTKLCEFPMLETGLFFLLSWSAFLSAEAAGLTGIVAVLFCGVTQAHYTYNNLSSDSKIRTKQLFEFMNFLAENVIFCYMGLALFTFQNHIFNALFILGAFLAIFVARACNIYPLSFLLNLGRKQKIPWNFQHMMMFSGLRGAIAFALAIRNTESQPKQMMFTTTLLLVFFTVWVFGGGTTPMLTWLQIRVGVDLDENLKEDPSSQHQEANNLDKNMTKAESARLFRMWYSFDHKYLKPILTHSGPPLTTTLPEWCGPISRLLTSPQAYGEQLKEDDVECIVNQDELAINYQEQASSPCSPPARLGLDQKASPQTPGKENIYEGDLGLGGYELKLEQTLGQSQLN

SEQ ID NO: 36117 - protein, 61 aa, Homo sapiens
  REGION 1..61: note = ENSP00000419090
MERQSRVMSEKDEYQFQHQGAVELLVFNFLLILTILTIWLFKNHRFRFLHETGGAMVYDDI

SEQ ID NO: 36118 - protein, 147 aa, Homo sapiens
  REGION 1..147: note = ENSP00000418627
MERQSRVMSEKDEYQFQHQGAVELLVFNFLLILTILTIWLFKNHRFRFLHETGGAMVYGLIMGLILRYATAPTDIESGTVYDCVKLTFSPSTLLVNITDQVYEYKYKREISQHNINPHQGNAILEKRHFFQNLGSILTYAFLGTAIS

SEQ ID NO: 36119 - protein, 87 aa, Homo sapiens
  REGION 1..87: note = ENSP00000432889
MGTENTPGGKASPDPQDVRPSVFHNIKLFVLCHSLLQLAQLMISGYLKSSISTVEKRFGLSSQTSGLLASFNEVGNTALIVFVSYFG

SEQ ID NO: 36120 - protein, 709 aa, Homo sapiens
  REGION 1..709: note = ENSP00000289575
MGPRIGPAGEVPQVPDKETKATMGTENTPGGKASPDPQDVRPSVFHNIKLFVLCHSLLQLAQLMISGYLKSSISTVEKRFGLSSQTSGLLASFNEVGNTALIVFVSYFGSRVHRPRMIGYGAILVALAGLLMTLPHFISEPYRYDNTSPEDMPQDFKASLCLPTTSAPASAPSNGNCSSYTETQHLSVVGIMFVAQTLLGVGGVPIQPFGISYIDDFAHNSNSPLYLGILFAVTMMGPGLAFGLGSLMLRLYVDINQMPEGGISLTIKDPRWVGAWWLGFLIAAGAVALAAIPYFFFPKEMPKEKRELQFRRKVLAVTDSPARKGKDSPSKQSPGESTKKQDGLVQIAPNLTVIQFIKVFPRVLLQTLRHPIFLLVVLSQVCLSSMAAGMATFLPKFLERQFSITASYANLLIGCLSFPSVIVGIVVGGVLVKRLHLGPVGCGALCLLGMLLCLFFSLPLFFIGCSSHQIAGITHQTSAHPGLELSPSCMEACSCPLDGFNPVCDPSTRVEYITPCHAGCSSWVVQDALDNSQVFYTNCSCVVEGNPVLAGSCDSTCSHLVVPFLLLVSLGSALACLTHTPSFMLILRGVKKEDKTLAVGIQFMFLRILAWMPSPVIHGSAIDTTCVHWALSCGRRAVCRYYNNDLLRNRFIGLQFFFKTGSVICFALVLAVLRQQDKEARTKESRSSPAVEQQLLVSGPGKKPEDSRV

SEQ ID NO: 36121 - protein, 593 aa, Homo sapiens
  REGION 1..593: note = ENSP00000434112
MIGYGAILVALAGLLMTLPHFISEPYRYDNTSPEDMPQDFKASLCLPTTSAPASAPSNGNCSSYTETQHLSVVGIMFVAQTLLGVGGVPIQPFGISYIDDFAHNSNSPLYLGILFAVTMMGPGLAFGLGSLMLRLYVDINQMPEGGISLTIKDPRWVGAWWLGFLIAAGAVALAAIPYFFFPKEMPKEKRELQFRRKVLAVTDSPARKGKDSPSKQSPGESTKKQDGLVQIAPNLTVIQFIKVFPRVLLQTLRHPIFLLVVLSQVCLSSMAAGMATFLPKFLERQFSITASYANLLIGCLSFPSVIVGIVVGGVLVKRLHLGPVGCGALCLLGMLLCLFFSLPLFFIGCSSHQIAGITHQTSAHPGLELSPSCMEACSCPLDGFNPVCDPSTRVEYITPCHAGCSSWVVQDALDNSQVFYTNCSCVVEGNPVLAGSCDSTCSHLVVPFLLLVSLGSALACLTHTPSFMLILRGVKKEDKTLAVGIQFMFLRILAWMPSPVIHGSAIDTTCVHWALSCGRRAVCRYYNNDLLRNRFIGLQFFFKTGSVICFALVLAVLRQQDKEARTKESRSSPAVEQQLLVSGPGKKPEDSRV

SEQ ID NO: 36122 - protein, 565 aa, Homo sapiens
  REGION 1..565: note = ENSP00000436324
MGPRIEDMPQDFKASLCLPTTSAPASAPSNGNCSSYTETQHLSVVGIMFVAQTLLGVGGVPIQPFGISYIDDFAHNSNSPLYLGILFAVTMMGPGLAFGLGSLMLRLYVDINQMPEGGISLTIKDPRWVGAWWLGFLIAAGAVALAAIPYFFFPKEMPKEKRELQFRRKVLAVTDSPARKGKDSPSKQSPGESTKKQDGLVQIAPNLTVIQFIKVFPRVLLQTLRHPIFLLVVLSQVCLSSMAAGMATFLPKFLERQFSITASYANLLIGCLSFPSVIVGIVVGGVLVKRLHLGPVGCGALCLLGMLLCLFFSLPLFFIGCSSHQIAGITHQTSAHPGLELSPSCMEACSCPLDGFNPVCDPSTRVEYITPCHAGCSSWVVQDALDNSQVFYTNCSCVVEGNPVLAGSCDSTCSHLVVPFLLLVSLGSALACLTHTPSFMLILRGVKKEDKTLAVGIQFMFLRILAWMPSPVIHGSAIDTTCVHWALSCGRRAVCRYYNNDLLRNRFIGLQFFFKTGSVICFALVLAVLRQQDKEARTKESRSSPAVEQQLLVSGPGKKPEDSRV

SEQ ID NO: 36123 - protein, 482 aa, Homo sapiens
  REGION 1..482: note = ENSP00000389653
MIGYGAILVALAGLLMTLPHFISEPYRYDNTSPGGISLTIKDPRWVGAWWLGFLIAAGAVALAAIPYFFFPKEMPKEKRELQFRRKVLAVTDSPARKGKDSPSKQSPGESTKKQDGLVQIAPNLTVIQFIKVFPRVLLQTLRHPIFLLVVLSQVCLSSMAAGMATFLPKFLERQFSITASYANLLIGCLSFPSVIVGIVVGGVLVKRLHLGPVGCGALCLLGMLLCLFFSLPLFFIGCSSHQIAGITHQTSAHPGLELSPSCMEACSCPLDGFNPVCDPSTRVEYITPCHAGCSSWVVQDALDNSQVFYTNCSCVVEGNPVLAGSCDSTCSHLVVPFLLLVSLGSALACLTHTPSFMLILRGVKKEDKTLAVGIQFMFLRILAWMPSPVIHGSAIDTTCVHWALSCGRRAVCRYYNNDLLRNRFIGLQFFFKTGSVICFALVLAVLRQQDKEARTKESRSSPAVEQQLLVSGPGKKPEDSRV

SEQ ID NO: 36124 - protein, 43 aa, Homo sapiens
  REGION 1..43: note = ENSP00000435384
MGTENTPGGKASPDPQDVRPSVFHNIKLFVLCHSLLQLAQLMI

SEQ ID NO: 36125 - protein, 43 aa, Homo sapiens; identical to SEQ ID NO: 36124
  REGION 1..43: note = ENSP00000431192

SEQ ID NO: 36126 - protein, 150 aa, Homo sapiens
  REGION 1..150: note = ENSP00000436513
MGTENTPGGKASPDPQDVRPSVFHNIKLFVLCHSLLQLAQLMISGYLKSSISTVEKRFGLSSQTSGLLASFNEVGNTALIVFVSYFGSRVHRPRMIGYGAILVALAGLLMTLPHFISEPYRYDNTSPEDMPQDFKASLCLPTTSAPASAP

SEQ ID NO: 36127 - protein, 43 aa, Homo sapiens; identical to SEQ ID NO: 36124
  REGION 1..43: note = ENSP00000431324

SEQ ID NO: 36128 - protein, 127 aa, Homo sapiens
  REGION 1..127: note = ENSP00000433872
MGTENTPGGKASPDPQDVRPSVFHNIKLFVLCHSLLQLAQLMISGYLKSSISTVEKRFGLSSQTSGLLASFNEVGNTALIVFVSYFGSRVHRPRMIGYGAILVALAGLLMTLPHFISEPYRYDNTSP

SEQ ID NO: 36129 - protein, 687 aa, Homo sapiens
  REGION 1..687: note = ENSP00000388912
MGTENTPGGKASPDPQDVRPSVFHNIKLFVLCHSLLQLAQLMISGYLKSSISTVEKRFGLSSQTSGLLASFNEVGNTALIVFVSYFGSRVHRPRMIGYGAILVALAGLLMTLPHFISEPYRYDNTSPEDMPQDFKASLCLPTTSAPASAPSNGNCSSYTETQHLSVVGIMFVAQTLLGVGGVPIQPFGISYIDDFAHNSNSPLYLGILFAVTMMGPGLAFGLGSLMLRLYVDINQMPEGGISLTIKDPRWVGAWWLGFLIAAGAVALAAIPYFFFPKEMPKEKRELQFRRKVLAVTDSPARKGKDSPSKQSPGESTKKQDGLVQIAPNLTVIQFIKVFPRVLLQTLRHPIFLLVVLSQVCLSSMAAGMATFLPKFLERQFSITASYANLLIGCLSFPSVIVGIVVGGVLVKRLHLGPVGCGALCLLGMLLCLFFSLPLFFIGCSSHQIAGITHQTSAHPGLELSPSCMEACSCPLDGFNPVCDPSTRVEYITPCHAGCSSWVVQDALDNSQVFYTNCSCVVEGNPVLAGSCDSTCSHLVVPFLLLVSLGSALACLTHTPSFMLILRGVKKEDKTLAVGIQFMFLRILAWMPSPVIHGSAIDTTCVHWALSCGRRAVCRYYNNDLLRNRFIGLQFFFKTGSVICFALVLAVLRQQDKEARTKESRSSPAVEQQLLVSGPGKKPEDSRV

SEQ ID NO: 36130 - protein, 147 aa, Homo sapiens
  REGION 1..147: note = ENSP00000434742
VALAGLLMTLPHFISEPYRYDNTSPEDMPQDFKASLCLPTTSAPASAPSNGNCSSYTETQHLSVVGIMFVAQTLLGVGGVPIQPFGISYIDDFAHNSNSPLYLGILFAVTMMGPGLAFGLGSLMLRLYVDINQMPEGEPQEHMFARP

SEQ ID NO: 36131 - protein, 620 aa, Homo sapiens
  REGION 1..620: note = ENSP00000434245
MPLHQLGDKPLTFPSPNSAMENGLDHTPPSRRASPGTPLSPGSLRSAAHSPLDTSKQPLCQLWAEKHGARGTHEVRYVSAGQSVACGWWAFAPPCLQVLNTPKGILFFLCAAAFLQGMTVNGFINTVITSLERRYDLHSYQSGLIASSYDIAACLCLTFVSYFGGSGHKPRWLGWGVLLMGTGSLVFALPHFTAGRYEVELDAGVRTCPANPGAVCADSTSGLSRYQLVFMLGQFLHGVGATPLYTLGVTYLDENVKSSCSPVYIAIFYTAAILGPAAGYLIGGALLNIYTEMGRRTELTTESPLWVGAWWVGFLGSGAAAFFTAVPILGYPRQLPGSQRYAVMRAAEMHQLKDSSRGEASNPDFGKTIRDLPLSIWLLLKNPTFILLCLAGATEATLITGMSTFSPKFLESQFSLSASEAATLFGYLVVPAGGGGTFLGGFFVNKLRLRGSAVIKFCLFCTVVSLLGILVFSLHCPSVPMAGVTASYGGSLLPEGHLNLTAPCNAACSCQPEHYSPVCGSDGLMYFSLCHAGCPAATETNVDGQKVSGAAAYRPCPPLDPGKGPPCLPLVIGAIVGLPRCTETVAVSLRIFPLVLAMPLQGNALQLVRESPSFWFSYSL

SEQ ID NO: 36132 - protein, 722 aa, Homo sapiens
  REGION 1..722: note = ENSP00000359538
MPLHQLGDKPLTFPSPNSAMENGLDHTPPSRRASPGTPLSPGSLRSAAHSPLDTSKQPLCQLWAEKHGARGTHEVRYVSAGQSVACGWWAFAPPCLQVLNTPKGILFFLCAAAFLQGMTVNGFINTVITSLERRYDLHSYQSGLIASSYDIAACLCLTFVSYFGGSGHKPRWLGWGVLLMGTGSLVFALPHFTAGRYEVELDAGVRTCPANPGAVCADSTSGLSRYQLVFMLGQFLHGVGATPLYTLGVTYLDENVKSSCSPVYIAIFYTAAILGPAAGYLIGGALLNIYTEMGRRTELTTESPLWVGAWWVGFLGSGAAAFFTAVPILGYPRQLPGSQRYAVMRAAEMHQLKDSSRGEASNPDFGKTIRDLPLSIWLLLKNPTFILLCLAGATEATLITGMSTFSPKFLESQFSLSASEAATLFGYLVVPAGGGGTFLGGFFVNKLRLRGSAVIKFCLFCTVVSLLGILVFSLHCPSVPMAGVTASYGGSLLPEGHLNLTAPCNAACSCQPEHYSPVCGSDGLMYFSLCHAGCPAATETNVDGQKVYRDCSCIPQNLSSGFGHATAGKCTSTCQRKPLLLVFIFVVIFFTFLSSIPALTATLRCVRDPQRSFALGIQWIVVRILGGIPGPIAFGWVIDKACLLWQDQCGQQGSCLVYQNSAMSRYILIMGLLYKVLGVLFFAIACFLYKPLSESSDGLETCLPSQSSAPDSATDSQLQSSV

SEQ ID NO: 36133 - protein, 151 aa, Homo sapiens
  REGION 1..151: note = ENSP00000414855
TTALCAARTASCTSHCATQGALQPRRRMWTARRCVRDPQRSFALGIQWIVVRILGGIPGPIAFGWVIDKACLLWQDQCGQQGSCLVYQNSAMSRYILIMGLLYKVLGVLFFAIACFLYKPLSESSDGLETCLPSQSSAPDSATDSQLQSSV

SEQ ID NO: 36134 - protein, 722 aa, Homo sapiens; identical to SEQ ID NO: 36132
  REGION 1..722: note = ENSP00000217159

SEQ ID NO: 36135 - protein, 724 aa, Homo sapiens
  REGION 1..724: note = ENSP00000309741
MKSAKGIENLAFVPSSPDILRRLSASPSQIEVSALSSDPQRENSQPQELQKPQEPQKSPEPSLPSAPPNVSEEKLRSLSLSEFEEGSYGWRNFHPQCLQRCNTPGGFLLHYCLLAVTQGIVVNGLVNISISTVEKRYEMKSSLTGLISSSYDISFCLLSLFVSFFGERGHKPRWLAFAAFMIGLGALVFSLPQFFSGEYKLGSLFEDTCVTTRNSTSCTSSTSSLSNYLYVFILGQLLLGAGGTPLYTLGTAFLDDSVPTHKSSLYIGTGYAMSILGPAIGYVLGGQLLTIYIDVAMGESTDVTEDDPRWLGAWWIGFLLSWIFAWSLIIPFSCFPKHLPGTAEIQAGKTSQAHQSNSNADVKFGKSIKDFPAALKNLMKNAVFMCLVLSTSSEALITTGFATFLPKFIENQFGLTSSFAATLGGAVLIPGAALGQILGGFLVSKFRMTCKNTMKFALFTSGVALTLSFVFMYAKCENEPFAGVSESYNGTGELGNLIAPCNANCNCSRSYYYPVCGDGVQYFSPCFAGCSNPVAHRKPKVYYNCSCIERKTEITSTAETFGFEAKAGKCETHCAKLPIFLCIFFIVIIFTFMAGTPITVSILRCVNHRQRSLALGIQFMVLRLLGTIPGPIIFGFTIDSTCILWDINDCGIKGACWIYDNIKMAHMLVAISVTCKVITMFFNGFAIFLYKPPPSATDVSFHKENAVVTNVLAEQDLNKIVKEG

SEQ ID NO: 36136 - protein, 80 aa, Homo sapiens
  REGION 1..80: note = ENSP00000468602
MEANQCPLVVEPSYPDLVINVGEVTLGEENRKKLQKIQRDQEKERVMRAACALLNSGGGVIRMAKKVEHPVEMGLDLEQS

SEQ ID NO: 36137 - protein, 90 aa, Homo sapiens
  REGION 1..90: note = ENSP00000395140
MEANQCPLVVEPSYPDLVINVGEVTLGEENRKKLQKIQRDQEKERVMRAACALLNSGGGVIRMAKKVEHPVEMGLDLEQSLRELIQSSDL

SEQ ID NO: 36138 - protein, 90 aa, Homo sapiens; identical to SEQ ID NO: 36137
  REGION 1..90: note = ENSP00000397454

SEQ ID NO: 36139 - protein, 100 aa, Homo sapiens
  REGION 1..100: note = ENSP00000468095
MEANQCPLVVEPSYPDLVINVGEVTLGEENRKKLQKIQRDQEKERVMRAACALLNSGGGVIRMAKKVEHPVEMGLDLEQSLRELIQSSDLQAFFETKQQG

SEQ ID NO: 36140 - protein, 111 aa, Homo sapiens
  REGION 1..111: note = ENSP00000393615
MEANQCPLVVEPSYPDLVINVGEVTLGEENRKKLQKIQRDQEKERVMRAACALLNSGGGVIRMAKKVEHPVEMGLDLEQSLRELIQSSDLQAFFETKQQGRCFYIFVKSWS

SEQ ID NO: 36141 - protein, 123 aa, Homo sapiens
  REGION 1..123: note = ENSP00000464806
MEANQCPLVVEPSYPDLVINVGEVTLGEENRKKLQKIQRDQEKERVMRAACALLNSGGGVIRMAKKVEHPVEMGLDLEQSLRELIQSSDLQAFFETKQQGRCFYIFVKSWSSGPFPEDRSVKP

SEQ ID NO: 36142 - protein, 901 aa, Homo sapiens
  REGION 1..901: note = ENSP00000378067
MEANQCPLVVEPSYPDLVINVGEVTLGEENRKKLQKIQRDQEKERVMRAACALLNSGGGVIRMAKKVEHPVEMGLDLEQSLRELIQSSDLQAFFETKQQGRCFYIFVKSWSSGPFPEDRSVKPRLCSLSSSLYRRSETSVRSMDSREAFCFLKTKRKPKILEEGPFHKIHKGVYQELPNSDPADPNSDPADLIFQKDYLEYGEILPFPESQLVEFKQFSTKHFQEYVKRTIPEYVPAFANTGGGYLFIGVDDKSREVLGCAKENVDPDSLRRKIEQAIYKLPCVHFCQPQRPITFTLKIVNVLKRGELYGYACMIRVNPFCCAVFSEAPNSWIVEDKYVCSLTTEKWVGMMTDTDPDLLQLSEDFECQLSLSSGPPLSRPVYSKKGLEHKKELQQLLFSVPPGYLRYTPESLWRDLISEHRGLEELINKQMQPFFRGILIFSRSWAVDLNLQEKPGVICDALLIAQNSTPILYTILREQDAEGQDYCTRTAFTLKQKLVNMGGYTGKVCVRAKVLCLSPESSAEALEAAVSPMDYPASYSLAGTQHMEALLQSLVIVLLGFRSLLSDQLGCEVLNLLTAQQYEIFSRSLRKNRELFVHGLPGSGKTIMAMKIMEKIRNVFHCEAHRILYVCENQPLRNFISDRNICRAETRKTFLRENFEHIQHIVIDEAQNFRTEDGDWYGKAKSITRRAKGGPGILWIFLDYFQTSHLDCSGLPPLSDQYPREELTRIVRNADPIAKYLQKEMQVIRSNPSFNIPTGCLEVFPEAEWSQGVQGTLRIKKYLTVEQIMTCVADTCRRFFDRGYSPKDVAVLVSTAKEVEHYKYELLKAMRKKRVVQLSDACDMLGDHIVLDSVRRFSGLERSIVFGIHPRTADPAILPNVLICLASRAKQHLYIFPWGGH

SEQ ID NO: 36143 - protein, 50 aa, Homo sapiens
  REGION 1..50: note = ENSP00000465198
  VARIANT 1: note = Any amino acid
XICRAETRKTFLRENFEHIQHIVIDEAQNFRTEDGDWYGKAKSITRRAKE

SEQ ID NO: 36144 - protein, 901 aa, Homo sapiens; identical to SEQ ID NO: 36142
  REGION 1..901: note = ENSP00000312402

SEQ ID NO: 36145 - protein, 48 aa, Homo sapiens
  REGION 1..48: note = ENSP00000465777
MEANQCPLVVEPSYPDLVINVGEVTLGEENRKKLQKIQRDQEKERVMR

SEQ ID NO: 36146 - protein, 1521 aa, Homo sapiens
  REGION 1..1521: note = ENSP00000427548
MRGVGWQMLSLSLGLVLAILNKVAPQACPAQCSCSGSTVDCHGLALRSVPRNIPRNTERLDLNGNNITRITKTDFAGLRHLRVLQLMENKISTIERGAFQDLKELERLRLNRNHLQLFPELLFLGTAKLYRLDLSENQIQAIPRKAFRGAVDIKNLQLDYNQISCIEDGAFRALRDLEVLTLNNNNITRLSVASFNHMPKLRTFRLHSNNLYCDCHLAWLSDWLRQRPRVGLYTQCMGPSHLRGHNVAEVQKREFVCSGHQSFMAPSCSVLHCPAACTCSNNIVDCRGKGLTEIPTNLPETITEIRLEQNTIKVIPPGAFSPYKKLRRIDLSNNQISELAPDAFQGLRSLNSLVLYGNKITELPKSLFEGLFSLQLLLLNANKINCLRVDAFQDLHNLNLLSLYDNKLQTIAKGTFSPLRAIQTMHLAQNPFICDCHLKWLADYLHTNPIETSGARCTSPRRLANKRIGQIKSKKFRCSGTEDYRSKLSGDCFADLACPEKCRCEGTTVDCSNQKLNKIPEHIPQYTAELRLNNNEFTVLEATGIFKKLPQLRKINFSNNKITDIEEGAFEGASGVNEILLTSNRLENVQHKMFKGLESLKTLMLRSNRITCVGNDSFIGLSSVRLLSLYDNQITTVAPGAFDTLHSLSTLNLLANPFNCNCYLAWLGEWLRKKRIVTGNPRCQKPYFLKEIPIQDVAIQDFTCDDGNDDNSCSPLSRCPTECTCLDTVVRCSNKGLKVLPKGIPRDVTELYLDGNQFTLVPKELSNYKHLTLIDLSNNRISTLSNQSFSNMTQLLTLILSYNRLRCIPPRTFDGLKSLRLLSLHGNDISVVPEGAFNDLSALSHLAIGANPLYCDCNMQWLSDWVKSEYKEPGIARCAGPGEMADKLLLTTPSKKFTCQGPVDVNILAKCNPCLSNPCKNDGTCNSDPVDFYRCTCPYGFKGQDCDVPIHACISNPCKHGGTCHLKEGEEDGFWCICADGFEGENCEVNVDDCEDNDCENNSTCVDGINNYTCLCPPEYTGELCEEKLDFCAQDLNPCQHDSKCILTPKGFKCDCTPGYVGEHCDIDFDDCQDNKCKNGAHCTDAVNGYTCICPEGYSGLFCEFSPPMVLPRTSPCDNFDCQNGAQCIVRINEPICQCLPGYQGEKCEKLVSVNFINKESYLQIPSAKVRPQTNITLQIATDEDSGILLYKGDKDHIAVELYRGRVRASYDTGSHPASAIYSVETINDGNFHIVELLALDQSLSLSVDGGNPKIITNLSKQSTLNFDSPLYVGGMPGKSNVASLRQAPGQNGTSFHGCIRNLYINSELQDFQKVPMQTGILPGCEPCHKKVCAHGTCQPSSQAGFTCECQEGWMGPLCDQRTNDPCLGNKCVHGTCLPINAFSYSCKCLEGHGGVLCDEEEDLFNPCQAIKCKHGKCRLSGLGQPYCECSSGYTGDSCDREISCRGERIRDYYQKQQGYAACQTTKKVSRLECRGGCAGGQCCGPLRSKRRKYSFECTDGSSFVDEVEKVVKCGCTRCVS

SEQ ID NO: 36147 - protein, 1529 aa, Homo sapiens
  REGION 1..1529: note = ENSP00000422591
MRGVGWQMLSLSLGLVLAILNKVAPQACPAQCSCSGSTVDCHGLALRSVPRNIPRNTERLDLNGNNITRITKTDFAGLRHLRVLQLMENKISTIERGAFQDLKELERLRLNRNHLQLFPELLFLGTAKLYRLDLSENQIQAIPRKAFRGAVDIKNLQLDYNQISCIEDGAFRALRDLEVLTLNNNNITRLSVASFNHMPKLRTFRLHSNNLYCDCHLAWLSDWLRQRPRVGLYTQCMGPSHLRGHNVAEVQKREFVCSGHQSFMAPSCSVLHCPAACTCSNNIVDCRGKGLTEIPTNLPETITEIRLEQNTIKVIPPGAFSPYKKLRRIDLSNNQISELAPDAFQGLRSLNSLVLYGNKITELPKSLFEGLFSLQLLLLNANKINCLRVDAFQDLHNLNLLSLYDNKLQTIAKGTFSPLRAIQTMHLAQNPFICDCHLKWLADYLHTNPIETSGARCTSPRRLANKRIGQIKSKKFRCSAKEQYFIPGTEDYRSKLSGDCFADLACPEKCRCEGTTVDCSNQKLNKIPEHIPQYTAELRLNNNEFTVLEATGIFKKLPQLRKINFSNNKITDIEEGAFEGASGVNEILLTSNRLENVQHKMFKGLESLKTLMLRSNRITCVGNDSFIGLSSVRLLSLYDNQITTVAPGAFDTLHSLSTLNLLANPFNCNCYLAWLGEWLRKKRIVTGNPRCQKPYFLKEIPIQDVAIQDFTCDDGNDDNSCSPLSRCPTECTCLDTVVRCSNKGLKVLPKGIPRDVTELYLDGNQFTLVPKELSNYKHLTLIDLSNNRISTLSNQSFSNMTQLLTLILSYNRLRCIPPRTFDGLKSLRLLSLHGNDISVVPEGAFNDLSALSHLAIGANPLYCDCNMQWLSDWVKSEYKEPGIARCAGPGEMADKLLLTTPSKKFTCQGPVDVNILAKCNPCLSNPCKNDGTCNSDPVDFYRCTCPYGFKGQDCDVPIHACISNPCKHGGTCHLKEGEEDGFWCICADGFEGENCEVNVDDCEDNDCENNSTCVDGINNYTCLCPPEYTGELCEEKLDFCAQDLNPCQHDSKCILTPKGFKCDCTPGYVGEHCDIDFDDCQDNKCKNGAHCTDAVNGYTCICPEGYSGLFCEFSPPMVLPRTSPCDNFDCQNGAQCIVRINEPICQCLPGYQGEKCEKLVSVNFINKESYLQIPSAKVRPQTNITLQIATDEDSGILLYKGDKDHIAVELYRGRVRASYDTGSHPASAIYSVETINDGNFHIVELLALDQSLSLSVDGGNPKIITNLSKQSTLNFDSPLYVGGMPGKSNVASLRQAPGQNGTSFHGCIRNLYINSELQDFQKVPMQTGILPGCEPCHKKVCAHGTCQPSSQAGFTCECQEGWMGPLCDQRTNDPCLGNKCVHGTCLPINAFSYSCKCLEGHGGVLCDEEEDLFNPCQAIKCKHGKCRLSGLGQPYCECSSGYTGDSCDREISCRGERIRDYYQKQQGYAACQTTKKVSRLECRGGCAGGQCCGPLRSKRRKYSFECTDGSSFVDEVEKVVKCGCTRCVS

SEQ ID NO: 36148 - protein, 1542 aa, Homo sapiens
  REGION 1..1542: note = ENSP00000273739
MRGVGWQMLSLSLGLVLAILNKVAPQACPAQCSCSGSTVDCHGLALRSVPRNIPRNTERLDLNGNNITRITKTDFAGLRHLRVLQLMENKISTIERGAFQDLKELERLRLNRNHLQLFPELLFLGTAKLYRLDLSENQIQAIPRKAFRGAVDIKNLQLDYNQISCIEDGAFRALRDLEVLTLNNNNITRLSVASFNHMPKLRTFRLHSNNLYCDCHLAWLSDWLRQRPRVGLYTQCMGPSHLRGHNVAEVQKREFVCSDEEEGHQSFMAPSCSVLHCPAACTCSNNIVDCRGKGLTEIPTNLPETITEIRLEQNTIKVIPPGAFSPYKKLRRIDLSNNQISELAPDAFQGLRSLNSLVLYGNKITELPKSLFEGLFSLQLLLLNANKINCLRVDAFQDLHNLNLLSLYDNKLQTIAKGTFSPLRAIQTMHLAQNPFICDCHLKWLADYLHTNPIETSGARCTSPRRLANKRIGQIKSKKFRCSAKEQYFIPGTEDYRSKLSGDCFADLACPEKCRCEGTTVDCSNQKLNKIPEHIPQYTAELRLNNNEFTVLEATGIFKKLPQLRKINFSNNKITDIEEGAFEGASGVNEILLTSNRLENVQHKMFKGLESLKTLMLRSNRITCVGNDSFIGLSSVRLLSLYDNQITTVAPGAFDTLHSLSTLNLLANPFNCNCYLAWLGEWLRKKRIVTGNPRCQKPYFLKEIPIQDVAIQDFTCDDGNDDNSCSPLSRCPTECTCLDTVVRCSNKGLKVLPKGIPRDVTELYLDGNQFTLVPKELSNYKHLTLIDLSNNRISTLSNQSFSNMTQLLTLILSYNRLRCIPPRTFDGLKSLRLLSLHGNDISVVPEGAFNDLSALSHLAIGANPLYCDCNMQWLSDWVKSEYKEPGIARCAGPGEMADKLLLTTPSKKFTCQGPVDVNILAKCNPCLSNPCKNDGTCNSDPVDFYRCTCPYGFKGQDCDVPIHACISNPCKHGGTCHLKEGEEDGFWCICADGFEGENCEVNVDDCEDNDCENNSTCVDGINNYTCLCPPEYTAANLNEVEKGELCEEKLDFCAQDLNPCQHDSKCILTPKGFKCDCTPGYVGEHCDIDFDDCQDNKCKNGAHCTDAVNGYTCICPEGYSGLFCEFSPPMVLPRTSPCDNFDCQNGAQCIVRINEPICQCLPGYQGEKCEKLVSVNFINKESYLQIPSAKVRPQTNITLQIATDEDSGILLYKGDKDHIAVELYRGRVRASYDTGSHPASAIYSVETINDGNFHIVELLALDQSLSLSVDGGNPKIITNLSKQSTLNFDSPLYVGGMPGKSNVASLRQAPGQNGTSFHGCIRNLYINSELQDFQKVPMQTGILPGCEPCHKKVCAHGTCQPSSQAGFTCECQEGWMGPLCDQRTNDPCLGNKCVHGTCLPINAFSYSCKCLEGHGGVLCDEEEDLFNPCQAIKCKHGKCRLSGLGQPYCECSSGYTGDSCDREISCRGERIRDYYQKQQGYAACQTTKKVSRLECRGGCAGGQCCGPLRSKRRKYSFECTDGSSFVDEVEKVVKCGCTRCVS

SEQ ID NO: 36149 - protein, 1525 aa, Homo sapiens
  REGION 1..1525: note = ENSP00000422261
MRGVGWQMLSLSLGLVLAILNKVAPQACPAQCSCSGSTVDCHGLALRSVPRNIPRNTERLDLNGNNITRITKTDFAGLRHLRVLQLMENKISTIERGAFQDLKELERLRLNRNHLQLFPELLFLGTAKLYRLDLSENQIQAIPRKAFRGAVDIKNLQLDYNQISCIEDGAFRALRDLEVLTLNNNNITRLSVASFNHMPKLRTFRLHSNNLYCDCHLAWLSDWLRQRPRVGLYTQCMGPSHLRGHNVAEVQKREFVCSDEEEGHQSFMAPSCSVLHCPAACTCSNNIVDCRGKGLTEIPTNLPETITEIRLEQNTIKVIPPGAFSPYKKLRRIDLSNNQISELAPDAFQGLRSLNSLVLYGNKITELPKSLFEGLFSLQLLLLNANKINCLRVDAFQDLHNLNLLSLYDNKLQTIAKGTFSPLRAIQTMHLAQNPFICDCHLKWLADYLHTNPIETSGARCTSPRRLANKRIGQIKSKKFRCSGTEDYRSKLSGDCFADLACPEKCRCEGTTVDCSNQKLNKIPEHIPQYTAELRLNNNEFTVLEATGIFKKLPQLRKINFSNNKITDIEEGAFEGASGVNEILLTSNRLENVQHKMFKGLESLKTLMLRSNRITCVGNDSFIGLSSVRLLSLYDNQITTVAPGAFDTLHSLSTLNLLANPFNCNCYLAWLGEWLRKKRIVTGNPRCQKPYFLKEIPIQDVAIQDFTCDDGNDDNSCSPLSRCPTECTCLDTVVRCSNKGLKVLPKGIPRDVTELYLDGNQFTLVPKELSNYKHLTLIDLSNNRISTLSNQSFSNMTQLLTLILSYNRLRCIPPRTFDGLKSLRLLSLHGNDISVVPEGAFNDLSALSHLAIGANPLYCDCNMQWLSDWVKSEYKEPGIARCAGPGEMADKLLLTTPSKKFTCQGPVDVNILAKCNPCLSNPCKNDGTCNSDPVDFYRCTCPYGFKGQDCDVPIHACISNPCKHGGTCHLKEGEEDGFWCICADGFEGENCEVNVDDCEDNDCENNSTCVDGINNYTCLCPPEYTGELCEEKLDFCAQDLNPCQHDSKCILTPKGFKCDCTPGYVGEHCDIDFDDCQDNKCKNGAHCTDAVNGYTCICPEGYSGLFCEFSPPMVLPRTSPCDNFDCQNGAQCIVRINEPICQCLPGYQGEKCEKLVSVNFINKESYLQIPSAKVRPQTNITLQIATDEDSGILLYKGDKDHIAVELYRGRVRASYDTGSHPASAIYSVETINDGNFHIVELLALDQSLSLSVDGGNPKIITNLSKQSTLNFDSPLYVGGMPGKSNVASLRQAPGQNGTSFHGCIRNLYINSELQDFQKVPMQTGILPGCEPCHKKVCAHGTCQPSSQAGFTCECQEGWMGPLCDQRTNDPCLGNKCVHGTCLPINAFSYSCKCLEGHGGVLCDEEEDLFNPCQAIKCKHGKCRLSGLGQPYCECSSGYTGDSCDREISCRGERIRDYYQKQQGYAACQTTKKVSRLECRGGCAGGQCCGPLRSKRRKYSFECTDGSSFVDEVEKVVKCGCTRCVS

SEQ ID NO: 36150 - protein, 146 aa, Homo sapiens
  REGION 1..146: note = ENSP00000426356
MEAVLFVNAEAAAPRQSGRPRDLNGNNITRITKTDFAGLRHLRVLQLMENKISTIERGAFQDLKELERLRLNRNHLQLFPELLFLGTAKLYRLDLSENQIQAIPRKAFRGAVDIKNLQLDYNQISCIEDGAFRALRDLEVLTLNNN

SEQ ID NO: 36151 - protein, 212 aa, Homo sapiens
  REGION 1..212: note = ENSP00000421975
MTQLLTLILSYNRLRCIPPRTFDGLKSLRLLSLHGNDISVVPEGAFNDLSALSHLAIGANPLYCDCNMQWLSDWVKSEYKEPGIARCAGPGEMADKLLLTTPSKKFTCQGLPGPCGFLIPGPVDVNILAKCNPCLSNPCKNDGTCNSDPVDFYRCTCPYGFKGQDCDVPIHACISNPCKHGGTCHLKEGEEDGFWCICADGFEGENCEVNVD

SEQ ID NO: 36152 - protein, 196 aa, Homo sapiens
  REGION 1..196: note = ENSP00000425609
  VARIANT 1: note = Any amino acid
XSDWVKSEYKEPGIARCAGPGEMADKLLLTTPSKKFTCQGPVDVNILAKCNPCLSNPCKNDGTCNSDPVDFYRCTCPYGFKGQDCDVPIHACISNPCKHGGTCHLKEGEEDGFWCICADGFEGENCEVNVDDCEDNDCENNSTCVDGINNYTCLCPPEYTGTNNRKYFAFHQYICLKASLELCYICLVNLFLFDKW

SEQ ID NO: 36153 - protein, 82 aa, Homo sapiens
  REGION 1..82: note = ENSP00000423179
  VARIANT 1: note = Any amino acid
XSYDTGSHPASAIYSVETINDGNFHIVELLALDQSLSLSVDGGNPKIITNLSKQSTLNFDSPLYVGGMPGKSNVASLRQGAL

SEQ ID NO: 36154 - protein, 1439 aa, Homo sapiens
  REGION 1..1439: note = ENSP00000482129
MENKISTIERGAFQDLKELERLRLNRNHLQLFPELLFLGTAKLYRLDLSENQIQAIPRKAFRGAVDIKNLQLDYNQISCIEDGAFRALRDLEVLTLNNNNITRLSVASFNHMPKLRTFRLHSNNLYCDCHLAWLSDWLRQRPRVGLYTQCMGPSHLRGHNVAEVQKREFVCSARHGGHQSFMAPSCSVLHCPAACTCSNNIVDCRGKGLTEIPTNLPETITEIRLEQNTIKVIPPGAFSPYKKLRRIDLSNNQISELAPDAFQGLRSLNSLVLYGNKITELPKSLFEGLFSLQLLLLNANKINCLRVDAFQDLHNLNLLSLYDNKLQTIAKGTFSPLRAIQTMHLAQNPFICDCHLKWLADYLHTNPIETSGARCTSPRRLANKRIGQIKSKKFRCSGTEDYRSKLSGDCFADLACPEKCRCEGTTVDCSNQKLNKIPEHIPQYTAELRLNNNEFTVLEATGIFKKLPQLRKINFSNNKITDIEEGAFEGASGVNEILLTSNRLENVQHKMFKGLESLKTLMLRSNRITCVGNDSFIGLSSVRLLSLYDNQITTVAPGAFDTLHSLSTLNLLANPFNCNCYLAWLGEWLRKKRIVTGNPRCQKPYFLKEIPIQDVAIQDFTCDDGNDDNSCSPLSRCPTECTCLDTVVRCSNKGLKVLPKGIPRDVTELYLDGNQFTLVPKELSNYKHLTLIDLSNNRISTLSNQSFSNMTQLLTLILSYNRLRCIPPRTFDGLKSLRLLSLHGNDISVVPEGAFNDLSALSHLAIGANPLYCDCNMQWLSDWVKSEYKEPGIARCAGPGEMADKLLLTTPSKKFTCQGPVDVNILAKCNPCLSNPCKNDGTCNSDPVDFYRCTCPYGFKGQDCDVPIHACISNPCKHGGTCHLKEGEEDGFWCICADGFEGENCEVNVDDCEDNDCENNSTCVDGINNYTCLCPPEYTGELCEEKLDFCAQDLNPCQHDSKCILTPKGFKCDCTPGYVGEHCDIDFDDCQDNKCKNGAHCTDAVNGYTCICPEGYSGLFCEFSPPMVLPRTSPCDNFDCQNGAQCIVRINEPICQCLPGYQGEKCEKLVSVNFINKESYLQIPSAKVRPQTNITLQIATDEDSGILLYKGDKDHIAVELYRGRVRASYDTGSHPASAIYSVETINDGNFHIVELLALDQSLSLSVDGGNPKIITNLSKQSTLNFDSPLYVGGMPGKSNVASLRQAPGQNGTSFHGCIRNLYINSELQDFQKVPMQTGILPGCEPCHKKVCAHGTCQPSSQAGFTCECQEGWMGPLCDQRTNDPCLGNKCVHGTCLPINAFSYSCKCLEGHGGVLCDEEEDLFNPCQAIKCKHGKCRLSGLGQPYCECSSGYTGDSCDREISCRGERIRDYYQKQQGYAACQTTKKVSRLECRGGCAGGQCCGPLRSKRRKYSFECTDGSSFVDEVEKVVKCGCTRCVS

SEQ ID NO: 36155 - protein, 1523 aa, Homo sapiens
  REGION 1..1523: note = ENSP00000430333
MAPGWAGVGAAVRARLALALALASVLSGPPAVACPTKCTCSAASVDCHGLGLRAVPRGIPRNAERLDLDRNNITRITKMDFAGLKNLRVLHLEDNQVSVIERGAFQDLKQLERLRLNKNKLQVLPELLFQSTPKLTRLDLSENQIQGIPRKAFRGITDVKNLQLDNNHISCIEDGAFRALRDLEILTLNNNNISRILVTSFNHMPKIRTLRLHSNHLYCDCHLAWLSDWLRQRRTVGQFTLCMAPVHLRGFNVADVQKKEYVCPAPHSEPPSCNANSISCPSPCTCSNNIVDCRGKGLMEIPANLPEGIVEIRLEQNSIKAIPAGAFTQYKKLKRIDISKNQISDIAPDAFQGLKSLTSLVLYGNKITEIVKGLFDGLVSLQLLLLNANKINCLRVNTFQDLQNLNLLSLYDNKLQTISKGLFAPLQSIQTLHLAQNPFVCDCHLKWLADYLQDNPIETSGARCSSPRRLANKRISQIKSKKFRCSGSEDYRSRFSSECFMDLVCPEKCRCEGTIVDCSNQKLVRIPSHLPEYVTDLRLNDNEVSVLEATGIFKKLPNLRKINLSNNKIKEVREGAFDGAASVQELMLTGNQLETVHGRVFRGLSGLKTLMLRSNLIGCVSNDTFAGLSSVRLLSLYDNRITTITPGAFTTLVSLSTINLLSNPFNCNCHLAWLGKWLRKRRIVSGNPRCQKPFFLKEIPIQDVAIQDFTCDGNEESSCQLSPRCPEQCTCMETVVRCSNKGLRALPRGMPKDVTELYLEGNHLTAVPRELSALRHLTLIDLSNNSISMLTNYTFSNMSHLSTLILSYNRLRCIPVHAFNGLRSLRVLTLHGNDISSVPEGSFNDLTSLSHLALGTNPLHCDCSLRWLSEWVKAGYKEPGIARCSSPEPMADRLLLTTPTHRFQCKGPVDINIVAKCNACLSSPCKNNGTCTQDPVELYRCACPYSYKGKDCTVPINTCIQNPCQHGGTCHLSDSHKDGFSCSCPLGFEGQRCEINPDDCEDNDCENNATCVDGINNYVCICPPNYTGELCDEVIDHCVPELNLCQHEAKCIPLDKGFSCECVPGYSGKLCETDNDDCVAHKCRHGAQCVDTINGYTCTCPQGFSGPFCEHPPPMVLLQTSPCDQYECQNGAQCIVVQQEPTCRCPPGFAGPRCEKLITVNFVGKDSYVELASAKVRPQANISLQVATDKDNGILLYKGDNDPLALELYQGHVRLVYDSLSSPPTTVYSVETVNDGQFHSVELVTLNQTLNLVVDKGTPKSLGKLQKQPAVGINSPLYLGGIPTSTGLSALRQGTDRPLGGFHGCIHEVRINNELQDFKALPPQSLGVSPGCKSCTVCKHGLCRSVEKDSVVCECRPGWTGPLCDQEARDPCLGHRCHHGKCVATGTSYMCKCAEGYGGDLCDNKNDSANACSAFKCHHGQCHISDQGEPYCLCQPGFSGEHCQQENPCLGQVVREVIRRQKGYASCATASKVPIMECRGGCGPQCCQPTRSKRRKYVFQCTDGSSFVEEVERHLECGCLACS

SEQ ID NO: 36156 - protein, 1530 aa, Homo sapiens
  REGION 1..1530: note = ENSP00000332164
MAPGWAGVGAAVRARLALALALASVLSGPPAVACPTKCTCSAASVDCHGLGLRAVPRGIPRNAERLDLDRNNITRITKMDFAGLKNLRVLHLEDNQVSVIERGAFQDLKQLERLRLNKNKLQVLPELLFQSTPKLTRLDLSENQIQGIPRKAFRGITDVKNLQLDNNHISCIEDGAFRALRDLEILTLNNNNISRILVTSFNHMPKIRTLRLHSNHLYCDCHLAWLSDWLRQRRTVGQFTLCMAPVHLRGFNVADVQKKEYVCPAPHSEPPSCNANSISCPSPCTCSNNIVDCRGKGLMEIPANLPEGIVEIRLEQNSIKAIPAGAFTQYKKLKRIDISKNQISDIAPDAFQGLKSLTSLVLYGNKITEIVKGLFDGLVSLQLLLLNANKINCLRVNTFQDLQNLNLLSLYDNKLQTISKGLFAPLQSIQTLHLAQNPFVCDCHLKWLADYLQDNPIETSGARCSSPRRLANKRISQIKSKKFRCSGSEDYRSRFSSECFMDLVCPEKCRCEGTIVDCSNQKLVRIPSHLPEYVTDLRLNDNEVSVLEATGIFKKLPNLRKINLSNNKIKEVREGAFDGAASVQELMLTGNQLETVHGRVFRGLSGLKTLMLRSNLIGCVSNDTFAGLSSVRLLSLYDNRITTITPGAFTTLVSLSTINLLSNPFNCNCHLAWLGKWLRKRRIVSGNPRCQKPFFLKEIPIQDVAIQDFTCDGNEESSCQLSPRCPEQCTCMETVVRCSNKGLRALPRGMPKDVTELYLEGNHLTAVPRELSALRHLTLIDLSNNSISMLTNYTFSNMSHLSTLILSYNRLRCIPVHAFNGLRSLRVLTLHGNDISSVPEGSFNDLTSLSHLALGTNPLHCDCSLRWLSEWVKAGYKEPGIARCSSPEPMADRLLLTTPTHRFQCKVLWFCCPGPVDINIVAKCNACLSSPCKNNGTCTQDPVELYRCACPYSYKGKDCTVPINTCIQNPCQHGGTCHLSDSHKDGFSCSCPLGFEGQRCEINPDDCEDNDCENNATCVDGINNYVCICPPNYTGELCDEVIDHCVPELNLCQHEAKCIPLDKGFSCECVPGYSGKLCETDNDDCVAHKCRHGAQCVDTINGYTCTCPQGFSGPFCEHPPPMVLLQTSPCDQYECQNGAQCIVVQQEPTCRCPPGFAGPRCEKLITVNFVGKDSYVELASAKVRPQANISLQVATDKDNGILLYKGDNDPLALELYQGHVRLVYDSLSSPPTTVYSVETVNDGQFHSVELVTLNQTLNLVVDKGTPKSLGKLQKQPAVGINSPLYLGGIPTSTGLSALRQGTDRPLGGFHGCIHEVRINNELQDFKALPPQSLGVSPGCKSCTVCKHGLCRSVEKDSVVCECRPGWTGPLCDQEARDPCLGHRCHHGKCVATGTSYMCKCAEGYGGDLCDNKNDSANACSAFKCHHGQCHISDQGEPYCLCQPGFSGEHCQQENPCLGQVVREVIRRQKGYASCATASKVPIMECRGGCGPQCCQPTRSKRRKYVFQCTDGSSFVEEVERHLECGCLACS

SEQ ID NO: 36157 - protein, 1393 aa, Homo sapiens
  REGION 1..1393: note = ENSP00000384890
RDLSENQIQGIPRKAFRGITDVKNLQLDNNHISCIEDGAFRALRDLEILTLNNNNISRILVTSFNHMPKIRTLRLHSNHLYCDCHLAWLSDWLRQRRTVGQFTLCMAPVHLRGFNVADVQKKEYVCPAPHSEPPSCNANSISCPSPCTCSNNIVDCRGKGLMEIPANLPEGIVEIRLEQNSIKAIPAGAFTQYKKLKRIDISKNQISDIAPDAFQGLKSLTSLVLYGNKITEIVKGLFDGLVSLQLLLLNANKINCLRVNTFQDLQNLNLLSLYDNKLQTISKGLFAPLQSIQTLHLAQNPFVCDCHLKWLADYLQDNPIETSGARCSSPRRLANKRISQIKSKKFRCSGSEDYRSRFSSECFMDLVCPEKCRCEGTIVDCSNQKLVRIPSHLPEYVTDLRLNDNEVSVLEATGIFKKLPNLRKINLSNNKIKEVREGAFDGAASVQELMLTGNQLETVHGRVFRGLSGLKTLMLRSNLIGCVSNDTFAGLSSVRLLSLYDNRITTITPGAFTTLVSLSTINLLSNPFNCNCHLAWLGKWLRKRRIVSGNPRCQKPFFLKEIPIQDVAIQDFTCDGNEESSCQLSPRCPEQCTCMETVVRCSNKGLRALPRGMPKDVTELYLEGNHLTAVPRELSALRHLTLIDLSNNSISMLTNYTFSNMSHLSTLILSYNRLRCIPVHAFNGLRSLRVLTLHGNDISSVPEGSFNDLTSLSHLALGTNPLHCDCSLRWLSEWVKAGYKEPGIARCSSPEPMADRLLLTTPTHRFQCKVLWFCCPGPVDINIVAKCNACLSSPCKNNGTCTQDPVELYRCACPYSYKGKDCTVPINTCIQNPCQHGGTCHLSDSHKDGFSCSCPLGFEGQRCEINPDDCEDNDCENNATCVDGINNYVCICPPNYTGELCDEVIDHCVPELNLCQHEAKCIPLDKGFSCECVPGYSGKLCETDNDDCVAHKCRHGAQCVDTINGYTCTCPQGFSGPFCEHPPPMVLLQTSPCDQYECQNGAQCIVVQQEPTCRCPPGFAGPRCEKLITVNFVGKDSYVELASAKVRPQANISLQVATDKDNGILLYKGDNDPLALELYQGHVRLVYDSLSSPPTTVYSVETVNDGQFHSVELVTLNQTLNLVVDKGTPKSLGKLQKQPAVGINSPLYLGGIPTSTGLSALRQGTDRPLGGFHGCIHEVRINNELQDFKALPPQSLGVSPGCKSCTVCKHGLCRSVEKDSVVCECRPGWTGPLCDQEARDPCLGHRCHHGKCVATGTSYMCKCAEGYGGDLCDNKNDSANACSAFKCHHGQCHISDQGEPYCLCQPGFSGEHCQQENPCLGQVVREVIRRQKGYASCATASKVPIMECRGGCGPQCCQPTRSKRRKYVFQCTDGSSFVEEVERHLECGCLACS

SEQ ID NO: 36158 - protein, 696 aa, Homo sapiens
  REGION 1..696: note = ENSP00000366288
MLLWILLLETSLCFAAGNVTGDVCKEKICSCNEIEGDLHVDCEKKGFTSLQRFTAPTSQFYHLFLHGNSLTRLFPNEFANFYNAVSLHMENNGLHEIVPGAFLGLQLVKRLHINNNKIKSFRKQTFLGLDDLEYLQADFNLLRDIDPGAFQDLNKLEVLILNDNLISTLPANVFQYVPITHLDLRGNRLKTLPYEEVLEQIPGIAEILLEDNPWDCTCDLLSLKEWLENIPKNALIGRVVCEAPTRLQGKDLNETTEQDLCPLKNRVDSSLPAPPAQEETFAPGPLPTPFKTNGQEDHATPGSAPNGGTKIPGNWQIKIRPTAAIATGSSRNKPLANSLPCPGGCSCDHIPGSGLKMNCNNRNVSSLADLKPKLSNVQELFLRDNKIHSIRKSHFVDYKNLILLDLGNNNIATVENNTFKNLLDLRWLYMDSNYLDTLSREKFAGLQNLEYLNVEYNAIQLILPGTFNAMPKLRILILNNNLLRSLPVDVFAGVSLSKLSLHNNYFMYLPVAGVLDQLTSIIQIDLHGNPWECSCTIVPFKQWAERLGSEVLMSDLKCETPVNFFRKDFMLLSNDEICPQLYARISPTLTSHSKNSTGLAETGTHSNSYLDTSRVSISVLVPGLLLVFVTSAFTVVGMLVFILRNRKRSKRRDANSSASEINSLQTVCDSSYWHNGPYNADGAHRVYDCGSHSLSD

SEQ ID NO: 36159 - protein, 841 aa, Homo sapiens
  REGION 1..841: note = ENSP00000383143
MKLWIHLFYSSLLACISLHSQTPVLSSRGSCDSLCNCEEKDGTMLINCEAKGIKMVSEISVPPSRPFQLSLLNNGLTMLHTNDFSGLTNAISIHLGFNNIADIEIGAFNGLGLLKQLHINHNSLEILKEDTFHGLENLEFLQADNNFITVIEPSAFSKLNRLKVLILNDNAIESLPPNIFRFVPLTHLDLRGNQLQTLPYVGFLEHIGRILDLQLEDNKWACNCDLLQLKTWLENMPPQSIIGDVVCNSPPFFKGSILSRLKKESICPTPPVYEEHEDPSGSLHLAATSSINDSRMSTKTTSILKLPTKAPGLIPYITKPSTQLPGPYCPIPCNCKVLSPSGLLIHCQERNIESLSDLRPPPQNPRKLILAGNIIHSLMKSDLVEYFTLEMLHLGNNRIEVLEEGSFMNLTRLQKLYLNGNHLTKLSKGMFLGLHNLEYLYLEYNAIKEILPGTFNPMPKLKVLYLNNNLLQVLPPHIFSGVPLTKVNLKTNQFTHLPVSNILDDLDLLTQIDLEDNPWDCSCDLVGLQQWIQKLSKNTVTDDILCTSPGHLDKKELKALNSEILCPGLVNNPSMPTQTSYLMVTTPATTTNTADTILRSLTDAVPLSVLILGLLIMFITIVFCAAGIVVLVLHRRRRYKKKQVDEQMRDNSPVHLQYSMYGHKTTHHTTERPSASLYEQHMVSPMVHVYRSPSFGPKHLEEEEERNEKEGSDAKHLQRSLLEQENHSPLTGSNMKYKTTNQSTEFLSFQDASSLYRNILEKERELQQLGITEYLRKNIAQLQPDMEAHYPGAHEELKLMETLMYSRPRKVLVEQTKNEYFELKANLHAEPDYLEVLEQQT

SEQ ID NO: 36160 - protein, 92 aa, Homo sapiens
  REGION 1..92: note = ENSP00000453082
MELCEFAFNMKKDEVCVNPYHYQRVETPVLPPVLVPRHTEIPAEFPPLDDYSHSIPENTNFPAGIEPQSNIPETPPPGYLSEDGETSDHQMN

SEQ ID NO: 36161 - protein, 425 aa, Homo sapiens
  REGION 1..425: note = ENSP00000332973
MSSILPFTPPIVKRLLGWKKGEQNGQEEKWCEKAVKSLVKKLKKTGQLDELEKAITTQNVNTKCITIPRSLDGRLQVSHRKGLPHVIYCRLWRWPDLHSHHELRAMELCEFAFNMKKDEVCVNPYHYQRVETPVLPPVLVPRHTEIPAEFPPLDDYSHSIPENTNFPAGIEPQSNIPETPPPGYLSEDGETSDHQMNHSMDAGSPNLSPNPMSPAHNNLDLQPVTYCEPAFWCSISYYELNQRVGETFHASQPSMTVDGFTDPSNSERFCLGLLSNVNRNAAVELTRRHIGRGVRLYYIGGEVFAECLSDSAIFVQSPNCNQRYGWHPATVCKIPPGCNLKIFNNQEFAALLAQSVNQGFEAVYQLTRMCTIRMSFVKGWGAEYRRQTVTSTPCWIELHLNGPLQWLDKVLTQMGSPSIRCSSVS

SEQ ID NO: 36162 - protein, 96 aa, Homo sapiens
  REGION 1..96: note = ENSP00000453788
MGGWTPFLRGPVWRRVRQPMEMGQCSEMLHKCGLLPQTVDRAYVLSEDQLCPWMAGCRCPIGRGSLMSSTAACGDGQTCTATTSYGPWSCVSSPSI

SEQ ID NO: 36163 - protein, 114 aa, Homo sapiens
  REGION 1..114: note = ENSP00000455095
MELCEFAFNMKKDEVCVNPYHYQRVETPVLPPVLVPRHTEIPAEFPPLDDYSHSIPENTNFPAGIEPQSNIPETPPPGYLSEDGETSDHQMNHSMDAGSPNLSPNPMSPAHNNL

SEQ ID NO: 36164 - protein, 320 aa, Homo sapiens
  REGION 1..320: note = ENSP00000437757
MELCEFAFNMKKDEVCVNPYHYQRVETPVLPPVLVPRHTEIPAEFPPLDDYSHSIPENTNFPAGIEPQSNIPETPPPGYLSEDGETSDHQMNHSMDAGSPNLSPNPMSPAHNNLDLQPVTYCEPAFWCSISYYELNQRVGETFHASQPSMTVDGFTDPSNSERFCLGLLSNVNRNAAVELTRRHIGRGVRLYYIGGEVFAECLSDSAIFVQSPNCNQRYGWHPATVCKIPPGCNLKIFNNQEFAALLAQSVNQGFEAVYQLTRMCTIRMSFVKGWGAEYRRQTVTSTPCWIELHLNGPLQWLDKVLTQMGSPSIRCSSVS

SEQ ID NO: 36165 - protein, 213 aa, Homo sapiens
  REGION 1..213: note = ENSP00000458060
MELCEFAFNMKKDEVCVNPYHYQRVETPVLPPVLVPRHTEIPAEFPPLDDYSHSIPENTNFPAGIEPQSNIPETPPPGYLSEDGETSDHQMNHSMDAGSPNLSPNPMSPAHNNLDLQPVTYCEPAFWCSISYYELNQRVGETFHASQPSMTVDGFTDPSNSERFCLGLLSNVNRNAAVELTRRHIGCNLKIFNNQEFAALLAQSVNQGFEAVY

SEQ ID NO: 36166 - protein, 381 aa, Homo sapiens
  REGION 1..381: note = ENSP00000401133
MSCLHPRQTWKGAALVHRKAWWMGRSLDGRLQVSHRKGLPHVIYCRLWRWPDLHSHHELRAMELCEFAFNMKKDEVCVNPYHYQRVETPVLPPVLVPRHTEIPAEFPPLDDYSHSIPENTNFPAGIEPQSNIPETPPPGYLSEDGETSDHQMNHSMDAGSPNLSPNPMSPAHNNLDLQPVTYCEPAFWCSISYYELNQRVGETFHASQPSMTVDGFTDPSNSERFCLGLLSNVNRNAAVELTRRHIGRGVRLYYIGGEVFAECLSDSAIFVQSPNCNQRYGWHPATVCKIPPGCNLKIFNNQEFAALLAQSVNQGFEAVYQLTRMCTIRMSFVKGWGAEYRRQTVTSTPCWIELHLNGPLQWLDKVLTQMGSPSIRCSSVS

SEQ ID NO: 36167 - protein, 63 aa, Homo sapiens
  REGION 1..63: note = ENSP00000453684
MELCEFAFNMKKDEVCVNPYHYQRVETPVLPPVLVPRHTEIPAEFPPLDDYSHSIPENTNFPA

SEQ ID NO: 36168 - protein, 230 aa, Homo sapiens
  REGION 1..230: note = ENSP00000445348
MNHSMDAGSPNLSPNPMSPAHNNLDLQPVTYCEPAFWCSISYYELNQRVGETFHASQPSMTVDGFTDPSNSERFCLGLLSNVNRNAAVELTRRHIGRGVRLYYIGGEVFAECLSDSAIFVQSPNCNQRYGWHPATVCKIPPGCNLKIFNNQEFAALLAQSVNQGFEAVYQLTRMCTIRMSFVKGWGAEYRRQTVTSTPCWIELHLNGPLQWLDKVLTQMGSPSIRCSSVS

SEQ ID NO: 36169 - protein, 84 aa, Homo sapiens
  REGION 1..84: note = ENSP00000454165
MNHSMDAGSPNLSPNPMSPAHNNLDLQPVTYCEPAFWCSISYYELNQRVGETFHASQPSMTVDGFTDPSNSERFCLGLLSNVNR

SEQ ID NO: 36170 - protein, 112 aa, Homo sapiens
  REGION 1..112: note = ENSP00000452767
MNHSMDAGSPNLSPNPMSPAHNNLDLQPVTYCEPAFWCSISYYELNQRVGETFHASQPSMTVDGFTDPSNSERFCLGLLSNVNRNAAVELTRRHIGRGVRLYYIGGEVFAEC

SEQ ID NO: 36171 - protein, 156 aa, Homo sapiens
  REGION 1..156: note = ENSP00000455540
  VARIANT 1: note = Any amino acid
XLSDSAIFVQSPNCNQRYGWHPATVCKIPPGKAPLSTPSPYFWKPSLQTSPCSGSRSLWASLPSPLAGCNLKIFNNQEFAALLAQSVNQGFEAVYQLTRMCTIRMSFVKGWGAEYRRQTVTSTPCWIELHLNGPLQWLDKVLTQMGSPSIRCSSVS

SEQ ID NO: 36172 - protein, 426 aa, Homo sapiens
  REGION 1..426: note = ENSP00000262158
MFRTKRSALVRRLWRSRAPGGEDEEEGAGGGGGGGELRGEGATDSRAHGAGGGGPGRAGCCLGKAVRGAKGHHHPHPPAAGAGAAGGAEADLKALTHSVLKKLKERQLELLLQAVESRGGTRTACLLLPGRLDCRLGPGAPAGAQPAQPPSSYSLPLLLCKVFRWPDLRHSSEVKRLCCCESYGKINPELVCCNPHHLSRLCELESPPPPYSRYPMDFLKPTADCPDAVPSSAETGGTNYLAPGGLSDSQLLLEPGDRSHWCVVAYWEEKTRVGRLYCVQEPSLDIFYDLPQGNGFCLGQLNSDNKSQLVQKVRSKIGCGIQLTREVDGVWVYNRSSYPIFIKSATLDNPDSRTLLVHKVFPGFSIKAFDYEKAYSLQRPNDHEFMQQPWTGFTVQISFVKGWGQCYTRQFISSCPCWLEVIFNSR

SEQ ID NO: 36173 - protein, 211 aa, Homo sapiens
  REGION 1..211: note = ENSP00000466902
MDFLKPTADCPDAVPSSAETGGTNYLAPGGLSDSQLLLEPGDRSHWCVVAYWEEKTRVGRLYCVQEPSLDIFYDLPQGNGFCLGQLNSDNKSQLVQKVRSKIGCGIQLTREVDGVWVYNRSSYPIFIKSATLDNPDSRTLLVHKVFPGFSIKAFDYEKAYSLQRPNDHEFMQQPWTGFTVQISFVKGWGQCYTRQFISSCPCWLEVIFNSR

SEQ ID NO: 36174 - protein, 425 aa, Homo sapiens
  REGION 1..425: note = ENSP00000467621
MFRTKRSALVRRLWRSRAPGGEDEEEGAGGGGGGGELRGEGATDSRAHGAGGGGPGRAGCCLGKAVRGAKGHHHPHPPAAGAGAAGGAEADLKALTHSVLKKLKERQLELLLQAVESRGGTRTACLLLPGRLDCRLGPGAPAGAQPAQPPSSYSLPLLLCKVFRWPDLRHSSEVKRLCCCESYGKINPELVCCNPHHLSRLCELESPPPPYSRYPMDFLKPTDCPDAVPSSAETGGTNYLAPGGLSDSQLLLEPGDRSHWCVVAYWEEKTRVGRLYCVQEPSLDIFYDLPQGNGFCLGQLNSDNKSQLVQKVRSKIGCGIQLTREVDGVWVYNRSSYPIFIKSATLDNPDSRTLLVHKVFPGFSIKAFDYEKAYSLQRPNDHEFMQQPWTGFTVQISFVKGWGQCYTRQFISSCPCWLEVIFNSR

SEQ ID NO: 36175 - protein, 158 aa, Homo sapiens
  REGION 1..158: note = ENSP00000465590
MDFLKPTADCPDAVPSSAETGGTNYLAPGGLSDSQLLLEPGDRSHWCVVAYWEEKTRVGRLYCVQEPSLDIFYDLPQGNGFCLGQLNSDNKSQLVQKVRSKIGCGIQLTREVDGVWVYNRSSYPIFIKSATLDNPDSRTLLVHKVFPGFSIKAFDYEK

SEQ ID NO: 36176 - protein, 118 aa, Homo sapiens
  REGION 1..118: note = ENSP00000471126
MQSLRPEQTRGLLEPERTKTLLPRESRAWEKPPHPACTKDWEAVEVGASSHDSDEKDLSSQETGLSQEWSSVEEDDESEGSQGFVEWSKAPQQTTIVLVVCVLFLFLVLTGMPMMFHI

SEQ ID NO: 36177 - protein, 103 aa, Homo sapiens
  REGION 1..103: note = ENSP00000472019
MQSLRPEQTRGLLEPERTKTLLPRESRAWEKPPHPACTKDWEAVEVGASSHDSDEKGLCGVVKSSTTNNHSLGSVRAFFVPGFNGDAYDVSHLTIMVAVVLKV

SEQ ID NO: 36178 - protein, 435 aa, Homo sapiens
  REGION 1..435: note = ENSP00000355110
MLPARCARLLTPHLLLVLVQLSPARGHRTTGPRFLISDRDPQCNLHCSRTQPKPICASDGRSYESMCEYQRAKCRDPTLGVVHRGRCKDAGQSKCRLERAQALEQAKKPQEAVFVPECGEDGSFTQVQCHTYTGYCWCVTPDGKPISGSSVQNKTPVCSGSVTDKPLSQGNSGRKDDGSKPTPTMETQPVFDGDEITAPTLWIKHLVIKDSKLNNTNIRNSEKVYSCDQERQSALEEAQQNPREGIVIPECAPGGLYKPVQCHQSTGYCWCVLVDTGRPLPGTSTRYVMPSCESDARAKTTEADDPFKDRELPGCPEGKKMEFITSLLDALTTDMVQAINSAAPTGGGRFSEPDPSHTLEERVVHWYFSQLDSNSSNDINKREMKPFKRYVKKKAKPKKCARRFTDYCDLNKDKVISLPELKGCLGVSKEVGRLV

SEQ ID NO: 36179 - protein, 434 aa, Homo sapiens
  REGION 1..434: note = ENSP00000370680
MLPARCARLLTPHLLLVLVQLSPARGHRTTGPRFLISDRDPQCNLHCSRTQPKPICASDGRSYESMCEYQRAKCRDPTLGVVHRGRCKDAGQSKCRLERAQALEQAKKPQEAVFVPECGEDGSFTQVQCHTYTGYCWCVTPDGKPISGSSVQNKTPVCSGSVTDKPLSQGNSGRKDDGSKPTPTMETQPVFDGDEITAPTLWIKHLVIKDSKLNNTNIRNSEKVYSCDQERQSALEEAQQNPREGIVIPECAPGGLYKPVQCHQSTGYCWCVLVDTGRPLPGTSTRYVMPSCESDARAKTTEADDPFKDRELPGCPEGKKMEFITSLLDALTTDMVQAINSAAPTGGGRFSEPDPSHTLEERVVHWYFSQLDSNSSNDINKREMKPFKRYVKKKAKPKKCARRFTDYCDLNKDKVISLPELKGCLGVSKEGRLV

SEQ ID NO: 36180 - protein, 88 aa, Homo sapiens
  REGION 1..88: note = ENSP00000368808
MNMSKQPVSNVRAIQANINIPMGAFRPGAGQPPRRKECTPEVEEGVPPTSDEEKKPIPGAKKLPGPAVNLSEIQNIKSELKYVPKAEQ

SEQ ID NO: 36181 - protein, 268 aa, Homo sapiens
  REGION 1..268: note = ENSP00000020945
MPRSFLVKKHFNASKKPNYSELDTHTVIISPYLYESYSMPVIPQPEILSSGAYSPITVWTTAAPFHAQLPNGLSPLSGYSSSLGRVSPPPPSDTSSKDHSGSESPISDEEERLQSKLSDPHAIEAEKFQCNLCNKTYSTFSGLAKHKQLHCDAQSRKSFSCKYCDKEYVSLGALKMHIRTHTLPCVCKICGKAFSRPWLLQGHIRTHTGEKPFSCPHCNRAFADRSNLRAHLQTHSDVKKYQCKNCSKTFSRMSLLHKHEESGCCVAH

SEQ ID NO: 36182 - protein, 89 aa, Homo sapiens
  REGION 1..89: note = ENSP00000380034
MPRSFLVKKHFNASKKPNYSELDTHTVIISPYLYESYSMPVIPQPEILSSGAYSPITVWTTAAPFHAQLPNGLSPLSGYSSSLGRVSPP

SEQ ID NO: 36183 - protein, 368 aa, Homo sapiens
  REGION 1..368: note = ENSP00000216294
MGTPPGLQTDCEALLSRFQETDSVRFEDFTELWRNMKFGTIFCGRMRNLEKNMFTKEALALAWRYFLPPYTFQIRVGALYLLYGLYNTQLCQPKQKIRVALKDWDEVLKFQQDLVNAQHFDAAYIFRKLRLDRAFHFTAMPKLLSYRMKKKIHRAEVTEEFKDPSDRVMKLITSDVLEEMLNVHDHYQNMKHVISVDKSKPDKALSLIKDDFFDNIKNIVLEHQQWHKDRKNPSLKSKTNDGEEKMEGNSQETERCERAESLAKIKSKAFSVVIQASKSRRHRQVKLDSSDSDSASGQGQVKATRKKEKKERLKPAGRKMSLRNKGNVQNIHKEDKPLSLSMPVITEEEENESLSGTEFTASKKRRKH

SEQ ID NO: 36184 - protein, 135 aa, Homo sapiens
  REGION 1..135: note = ENSP00000427090
MEAPEYLDLDEIDFSDDISYSVTSLKTIPELCRRCDTQNEDRSVSSSSWNCGISTLITNTQKPTGIADVYSKFRPVKRVSPLKHQPETLENNESDDQKNQKVVEYQKGGESDLGPQPQELGPGDGVGGPPGKSSE

SEQ ID NO: 36185 - protein, 66 aa, Homo sapiens
  REGION 1..66: note = ENSP00000426526
MEAPEYLDLDEIDFSDDISYSVTSLKTIPELCRRCDTQNEDRSEWSVGVRTLDGERNRSHCRTELF

SEQ ID NO: 36186 - protein, 160 aa, Homo sapiens
  REGION 1..160: note = ENSP00000426551
MEAPEYLDLDEIDFSDDISDNRSQGNRLQKLGLEDTDREDAMGFGSHRAKLTVVAALGACHCPENEYSVTSLKTIPELCRRCDTQNEDRSVSSSSWNCGISTLITNTQKPTGIADVYSKFRPVKRVSPLKHQPETLENNESDDQKNQKVVEYQKGGESDL

SEQ ID NO: 36187 - protein, 98 aa, Homo sapiens
  REGION 1..98: note = ENSP00000422610
MEAPEYLDLDEIDFSDDISYSVTSLKTIPELCRRCDTQNEDRSVSSSSWNCGISTLITNTQKPTGIADVYSKFRPVKRVSPLKHQPETLENNESDDQK

SEQ ID NO: 36188 - protein, 858 aa, Homo sapiens
  REGION 1..858: note = ENSP00000422106
MEAPEYLDLDEIDFSDDISYSVTSLKTIPELCRRCDTQNEDRSVSSSSWNCGISTLITNTQKPTGIADVYSKFRPVKRVSPLKHQPETLENNESDDQKNQKVVEYQKGGESDLGPQPQELGPGDGVGGPPGKSSEPSTSLGELEHYDLDMDEILDVPYIKSSQQLASFTKVTSEKRILGLCTTINGLSGKACSTGSSESSSSNMAPFCVLSPVKSPHLRKASAVIHDQHKLSTEETEISPPLVKCGSAYEPENQSKDFLNKTFSDPHGRKVEKTTPDCQLRAFHLQSSAAESKPEEQVSGLNRTSSQGPEERSEYLKKVKSILNIVKEGQISLLNGQLECVRWMVSETEAIAELSCSKDFPSLIHYAGCYGQEKILLWLLQFMQEQGISLDEVDQDGNSAVHVASQHGYLGCIQTLVEYGANVTMQNHAGEKPSQSAERQGHTLCSRYLVVVETCMSLASQVVKLTKQLKEQTVERVTLQNQLQQFLEAQKSEGKSLPSSPSSPSSPASRKSQWKSPDADDDSVAKSKPGVQEGIQVLGSLSASSRARPKAKDEDSDKILRQLLGKEISENVCTQEKLSLEFQDAQASSRNSKKIPLEKRELKLARLRQLMQRSLSESDTDSNNSEDPKTTPVRKADRPRPQPIVESVESMDSAESLHLMIKKHTLASGGRRFPFSIKASKSLDGHSPSPTSESSEPDLESQYPGSGSIPPNQPSGDPQQPSPDSTAAQKVATSPKSALKSPSSKRRTSQNLKLRVTFEEPVVQMEQPSLELNGEKDKDKGRTLQRTSTSNESGDQLKRPFGAFRSIMETLSGNQNNNNNYQAANQLKTSTLPLTSLGRKTDAKGNPASSASKGKNKA

SEQ ID NO: 36189 - protein, 919 aa, Homo sapiens
  REGION 1..919: note = ENSP00000261368
MEAPEYLDLDEIDFSDDISYSVTSLKTIPELCRRCDTQNEDRSVSSSSWNCGISTLITNTQKPTGIADVYSKFRPVKRVSPLKHQPETLENNESDDQKNQKVVEYQKGGESDLGPQPQELGPGDGVGGPPGKSSEPSTSLGELEHYDLDMDEILDVPYIKSSQQLASFTKVTSEKRILGLCTTINGLSGKACSTGSSESSSSNMAPFCVLSPVKSPHLRKASAVIHDQHKLSTEETEISPPLVKCGSAYEPENQSKDFLNKTFSDPHGRKVEKTTPDCQLRAFHLQSSAAESKPEEQVSGLNRTSSQGPEERSEYLKKVKSILNIVKEGQISLLPHLAADNLDKIHDENGNNLLHIAASQGHAECLQHLTSLMGEDCLNERNTEKLTPAGLAIKNGQLECVRWMVSETEAIAELSCSKDFPSLIHYAGCYGQEKILLWLLQFMQEQGISLDEVDQDGNSAVHVASQHGYLGCIQTLVEYGANVTMQNHAGEKPSQSAERQGHTLCSRYLVVVETCMSLASQVVKLTKQLKEQTVERVTLQNQLQQFLEAQKSEGKSLPSSPSSPSSPASRKSQWKSPDADDDSVAKSKPGVQEGIQVLGSLSASSRARPKAKDEDSDKILRQLLGKEISENVCTQEKLSLEFQDAQASSRNSKKIPLEKRELKLARLRQLMQRSLSESDTDSNNSEDPKTTPVRKADRPRPQPIVESVESMDSAESLHLMIKKHTLASGGRRFPFSIKASKSLDGHSPSPTSESSEPDLESQYPGSGSIPPNQPSGDPQQPSPDSTAAQKVATSPKSALKSPSSKRRTSQNLKLRVTFEEPVVQMEQPSLELNGEKDKDKGRTLQRTSTSNESGDQLKRPFGAFRSIMETLSGNQNNNNNYQAANQLKTSTLPLTSLGRKTDAKGNPASSASKGKNKAA

SEQ ID NO: 36190 - protein, 66 aa, Homo sapiens; identical to SEQ ID NO: 36185
  REGION 1..66: note = ENSP00000426280

SEQ ID NO: 36191 - protein, 67 aa, Homo sapiens
  REGION 1..67: note = ENSP00000425063
MEAPEYLDLDEIDFSDDISDNRSQGNRLQKLGLEDTDREDAMGFGSHRAKLTVVAALGACHCPENEY

SEQ ID NO: 36192 - protein, 1016 aa, Homo sapiens
  REGION 1..1016: note = ENSP00000261367
MEAPEYLDLDEIDFSDDISDNRSQGNRLQKLGLEDTDREDAMGFGSHRAKLTVVAALGACHCPENEYSVTSLKTIPELCRRCDTQNEDRSVSSSSWNCGISTLITNTQKPTGIADVYSKFRPVKRVSPLKHQPETLENNESDDQKNQKVVEYQKGGESDLGPQPQELGPGDGVGGPPGKSSEPSTSLGELEHYDLDMDEILDVPYIKSSQQLASFTKVTSEKRILGLCTTINGLSGKACSTGSSESSSSNMAPFCVLSPVKSPHLRKASAVIHDQHKLSTEETEISPPLVKCGSAYEPENQSKDFLNKTFSDPHGRKVEKTTPDCQLRAFHLQSSAAESKPEEQVSGLNRTSSQGPEERSEYLKKVKSILNIVKEGQISLLPHLAADNLDKIHDENGNNLLHIAASQGHAECLQHLTSLMGEDCLNERNTEKLTPAGLAIKNGQLECVRWMVSETEAIAELSCSKDFPSLIHYAGCYGQEKILLWLLQFMQEQGISLDEVDQDGNSAVHVASQHGYLGCIQTLVEYGANVTMQNHAGEKPSQSAERQGHTLCSRYLVVVETCMSLASQVVKLTKQLKEQTVERVTLQNQLQQFLEAQKSEGKSLPSSPSSPSSPASRKSQWKSPDADDDSVAKSKPGVQEGIQVLGSLSASSRARPKAKDEDSDKILRQLLGKEISENVCTQEKLSLEFQDAQASSRNSKKIPLEKRELKLARLRQLMQRSLSESDTDSNNSEDPKTTPVRKADRPRPQPIVESVESMDSAESLHLMIKKHTLASGGRRFPFSIKASKSLDGHSPSPTSESSEPDLESQYPGSGSIPPNQPSGDPQQPSPDSTAAQKVATSPKSALKSPSSKRRTSQNLKLRVTFEEPVVQMEQPSLELNGEKDKDKGRTLQRTSTSNESGDQLKRPFGAFRSIMETLSGNQNNNNNYQAANQLKTSTLPLTSLGRKTDAKGNPASSASKGKNKAEMYSSCINLSSNMLIEEHLCNDTRHNDINRKMKKSYSIKHIAEPESKELFL

SEQ ID NO: 36193 - protein, 62 aa, Homo sapiens
  REGION 1..62: note = ENSP00000427078
MEAPEYLDLDEIDFSDDISYSVTSLKTIPELCRRCDTQNEDRSGKDSSVASSVYARTGHLVG

SEQ ID NO: 36194 - protein, 66 aa, Homo sapiens; identical to SEQ ID NO: 36185
  REGION 1..66: note = ENSP00000424338

SEQ ID NO: 36195 - protein, 14 aa, Homo sapiens
  REGION 1..14: note = ENSP00000427587
MEAPEYLDLDEIDF

SEQ ID NO: 36196 - protein, 113 aa, Homo sapiens
  REGION 1..113: note = ENSP00000423360
MEAPEYLDLDEIDFSDDISDNRSQGNRLQKLGLEDTDREDAMGFGSHRAKLTVVAALGACHCPENEYSVTSLKTIPELCRRCDTQNEDRSEWSVGVRTLDGERNRSHCRTELF

SEQ ID NO: 36197 - protein, 588 aa, Homo sapiens
  REGION 1..588: note = ENSP00000378852
MEAPEYLDLDEIDFSDDISDNRSQGNRLQKLGLEDTDREDAMGFGSHRAKLTVVAALGACHCPENEYSVTSLKTIPELCRRCDTQNEDRSVSSSSWNCGISTLITNTQKPTGIADVYSKFRPVKRVSPLKHQPETLENNESDDQKNQKVVEYQKGGESDLGPQPQELGPGDGVGGPPGKSSEPSTSLGELEHYDLDMDEILDVPYIKSSQQLASFTKVTSEKRILGLCTTINGLSGKACSTGSSESSSSNMAPFCVLSPVKSPHLRKASAVIHDQHKLSTEETEISPPLVKCGSAYEPENQSKDFLNKTFSDPHGRKVEKTTPDCQLRAFHLQSSAAESKPEEQVSGLNRTSSQGPEERSEYLKKVKSILNIVKEGQISLLPHLAADNLDKIHDENGNNLLHIAASQGHAECLQHLTSLMGEDCLNERNTEKLTPAGLAIKNGQLECVRWMVSETEAIAELSCSKDFPSLIHYAGCYGQEKILLWLLQFMQEQGISLDEVDQDGNSAVHVASQHGYLGCIQTRLKIQGTWNGSETCLFTHHFSSYPPISSGLQCQGQEGVLFIPDQVGAATNKQVLFQNQLPETKSSY

SEQ ID NO: 36198 - protein, 88 aa, Homo sapiens
  REGION 1..88: note = ENSP00000378849
MEAPEYLDLDEIDFSDDISYSVTSLKTIPELCRRCDTQNEDRSATPSCRQSRQNSRRKWKQSITYCGVTGTRRVSTAPHFFDGRRLPQ

SEQ ID NO: 36199 - protein, 66 aa, Homo sapiens; identical to SEQ ID NO: 36185
  REGION 1..66: note = ENSP00000427575

SEQ ID NO: 36200 - protein, 603 aa, Homo sapiens
  REGION 1..603: note = ENSP00000368854
MTYLIQSHHSRRSQNCAEDVIRKTKTDQNGQLECVRWMVSETEAIAELSCSKDFPSLIHYAGCYGQEKILLWLLQFMQEQGISLDEVDQDGNSAVHVASQHGYLGCIQTLVEYGANVTMQNHAGEKPSQSAERQGHTLCSRYLVVVETCMSLASQVVKLTKQLKEQTVERVTLQNQLQQFLEAQKSEGKSLPSSPSSPSSPASRKSQWKSPDADDDSVAKSKPGVQEGIQVLGSLSASSRARPKAKDEDSDKILRQLLGKEISENVCTQEKLSLEFQDAQASSRNSKKIPLEKRELKLARLRQLMQRSLSESDTDSNNSEDPKTTPVRKADRPRPQPIVESVESMDSAESLHLMIKKHTLASGGRRFPFSIKASKSLDGHSPSPTSESSEPDLESQYPGSGSIPPNQPSGDPQQPSPDSTAAQKVATSPKSALKSPSSKRRTSQNLKLRVTFEEPVVQMEQPSLELNGEKDKDKGRTLQRTSTSNESGDQLKRPFGAFRSIMETLSGNQNNNNNYQAANQLKTSTLPLTSLGRKTDAKGNPASSASKGKNKAEMYSSCINLSSNMLIEEHLCNDTRHNDINRKMKKSYSIKHIAEPESKELFL

SEQ ID NO: 36201 - protein, 62 aa, Homo sapiens; identical to SEQ ID NO: 36193
  REGION 1..62: note = ENSP00000394392

SEQ ID NO: 36202 - protein, 88 aa, Homo sapiens; identical to SEQ ID NO: 36198
  REGION 1..88: note = ENSP00000426904

SEQ ID NO: 36203 - protein, 113 aa, Homo sapiens; identical to SEQ ID NO: 36196
  REGION 1..113: note = ENSP00000441681

SEQ ID NO: 36204 - protein, 1324 aa, Homo sapiens
  REGION 1..1324: note = ENSP00000384871
MRHGVAWALLVAAALGLGARGVRGAVALADFYPFGAERGDAVTPKQDDGGSGLRPLSVPFPFFGAEHSGLYVNNNGIISFLKEVSQFTPVAFPIAKDRCVVAAFWADVDNRRAGDVYYREATDPAMLRRATEDVRHYFPELLDFNATWVFVATWYRVTFFGGSSSSPVNTFQTVLITDGKLSFTIFNYESIVWTTGTHASSGGNATGLGGIAAQAGFNAGDGQRYFSIPGSRTADMAEVETTTNVGVPGRWAFRIDDAQVRVGGCGHTTSVCLALRPCLNGGKCIDDCVTGNPSYTCSCLSGFTGRRCHLDVNECASQPCQNGGTCTHGINSFRCQCPAGFGGPTCETAQSPCDTKECQHGGQCQVENGSAVCVCQAGYTGAACEMDVDDCSPDPCLNGGSCVDLVGNYTCLCAEPFKGLRCETGDHPVPDACLSAPCHNGGTCVDADQGYVCECPEGFMGLDCRERVPDDCECRNGGRCLGANTTLCQCPLGFFGLLCEFEITAMPCNMNTQCPDGGYCMEHGGSYLCVCHTDHNASHSLPSPCDSDPCFNGGSCDAHDDSYTCECPRGFHGKHCEKARPHLCSSGPCRNGGTCKEAGGEYHCSCPYRFTGRHCEIGKPDSCASGPCHNGGTCFHYIGKYKCDCPPGFSGRHCEIAPSPCFRSPCVNGGTCEDRDTDFFCHCQAGYMGRRCQAEVDCGPPEEVKHATLRFNGTRLGAVALYACDRGYSLSAPSRIRVCQPHGVWSEPPQCLEIDECRSQPCLHGGSCQDRVAGYLCLCSTGYEGAHCELERDECRAHPCRNGGSCRNLPGAYVCRCPAGFVGVHCETEVDACDSSPCQHGGRCESGGGAYLCVCPESFFGYHCETVSDPCFSSPCGGRGYCLASNGSHSCTCKVGYTGEDCAKELFPPTALKMERVEESGVSISWNPPNGPAARQMLDGYAVTYVSSDGSYRRTDFVDRTRSSHQLQALAAGRAYNISVFSVKRNSNNKNDISRPAVLLARTRPRPVEGFEVTNVTASTISVQWALHRIRHATVSGVRVSIRHPEALRDQATDVDRSVDRFTFRALLPGKRYTIQLTTLSGLRGEEHPTESLATAPTHVWTRPLPPANLTAARVTATSAHVVWDAPTPGSLLEAYVINVTTSQSTKSRYVPNGKLASYTVRDLLPGRRYQLSVIAVQSTELGPQHSEPAHLYIITSPRDGADRRWHQGGHHPRVLKNRPPPARLPELRLLNDHSAPETPTQPPRFSELVDGRGRVSARFGGSPSKAATVRSQPTASAQLENMEEAPKRVSLALQLPEHGSKDIGSESAALVGTLGLTDCSQGP

SEQ ID NO: 36205 - protein, 1352 aa, Homo sapiens
  REGION 1..1352: note = ENSP00000386007
MRHGVAWALLVAAALGLGARGVRGAVALADFYPFGAERGDAVTPKQDDGGSGLRPLSVPFPFFGAEHSGLYVNNNGIISFLKEVSQFTPVAFPIAKDRCVVAAFWADVDNRRAGDVYYREATDPAMLRRATEDVRHYFPELLDFNATWVFVATWYRVTFFGGSSSSPVNTFQTVLITDGKLSFTIFNYESIVWTTGTHASSGGNATGLGGIAAQAGFNAGDGQRYFSIPGSRTADMAEVETTTNVGVPGRWAFRIDDAQVRVGGCGHTTSVCLALRPCLNGGKCIDDCVTGNPSYTCSCLSGFTGRRCHLDVNECASQPCQNGGTCTHGINSFRCQCPAGFGGPTCETAQSPCDTKECQHGGQCQVENGSAVCVCQAGYTGAACEMDVDDCSPDPCLNGGSCVDLVGNYTCLCAEPFKGLRCETGDHPVPDACLSAPCHNGGTCVDADQGYVCECPEGFMGLDCRERVPDDCECRNGGRCLGANTTLCQCPLGFFGLLCEFEITAMPCNMNTQCPDGGYCMEHGGSYLCVCHTDHNASHSLPSPCDSDPCFNGGSCDAHDDSYTCECPRGFHGKHCEKARPHLCSSGPCRNGGTCKEAGGEYHCSCPYRFTGRHCEIGKPDSCASGPCHNGGTCFHYIGKYKCDCPPGFSGRHCEIAPSPCFRSPCVNGGTCEDRDTDFFCHCQAGYMGRRCQAEVDCGPPEEVKHATLRFNGTRLGAVALYACDRGYSLSAPSRIRVCQPHGVWSEPPQCLEIDECRSQPCLHGGSCQDRVAGYLCLCSTGYEGAHCELERDECRAHPCRNGGSCRNLPGAYVCRCPAGFVGVHCETEVDACDSSPCQHGGRCESGGGAYLCVCPESFFGYHCETVSDPCFSSPCGGRGYCLASNGSHSCTCKVGYTGEDCAKELFPPTALKMERVEESGVSISWNPPNGPAARQMLDGYAVTYVSSDGSYRRTDFVDRTRSSHQLQALAAGRAYNISVFSVKRNSNNKNDISRPAVLLARTRPRPVEGFEVTNVTASTISVQWALHRIRHATVSGVRVSIRHPEALRDQATDVDRSVDRFTFRALLPGKRYTIQLTTLSGLRGEEHPTESLATAPTHVWTRPLPPANLTAARVTATSAHVVWDAPTPGSLLEAYVINVTTSQSTKSRYVPNGKLASYTVRDLLPGRRYQLSVIAVQSTELGPQHSEPAHLYIITSPRDGADRRWHQGGHHPRVLKNRPPPARLPELRLLNDHSAPETPTQPPRFSELVDGRGRVSARFGGSPSKAATVRSHVPGNCSENPCQNGGTCVPGADAHSCDCGPGFKGRRCELACIKVSRPCTRLFSETKAFPVWEGGVCHHVKQSKSQTLEKS

SEQ ID NO: 36206 - protein, 1413 aa, Homo sapiens
  REGION 1..1413: note = ENSP00000308893
MRHGVAWALLVAAALGLGARGVRGAVALADFYPFGAERGDAVTPKQDDGGSGLRPLSVPFPFFGAEHSGLYVNNNGIISFLKEVSQFTPVAFPIAKDRCVVAAFWADVDNRRAGDVYYREATDPAMLRRATEDVRHYFPELLDFNATWVFVATWYRVTFFGGSSSSPVNTFQTVLITDGKLSFTIFNYESIVWTTGTHASSGGNATGLGGIAAQAGFNAGDGQRYFSIPGSRTADMAEVETTTNVGVPGRWAFRIDDAQVRVGGCGHTTSVCLALRPCLNGGKCIDDCVTGNPSYTCSCLSGFTGRRCHLDVNECASQPCQNGGTCTHGINSFRCQCPAGFGGPTCETAQSPCDTKECQHGGQCQVENGSAVCVCQAGYTGAACEMDVDDCSPDPCLNGGSCVDLVGNYTCLCAEPFKGLRCETGDHPVPDACLSAPCHNGGTCVDADQGYVCECPEGFMGLDCRERVPDDCECRNGGRCLGANTTLCQCPLGFFGLLCEFEITAMPCNMNTQCPDGGYCMEHGGSYLCVCHTDHNASHSLPSPCDSDPCFNGGSCDAHDDSYTCECPRGFHGKHCEKARPHLCSSGPCRNGGTCKEAGGEYHCSCPYRFTGRHCEIGKPDSCASGPCHNGGTCFHYIGKYKCDCPPGFSGRHCEIAPSPCFRSPCVNGGTCEDRDTDFFCHCQAGYMGRRCQAEVDCGPPEEVKHATLRFNGTRLGAVALYACDRGYSLSAPSRIRVCQPHGVWSEPPQCLEIDECRSQPCLHGGSCQDRVAGYLCLCSTGYEGAHCELERDECRAHPCRNGGSCRNLPGAYVCRCPAGFVGVHCETEVDACDSSPCQHGGRCESGGGAYLCVCPESFFGYHCETVSDPCFSSPCGGRGYCLASNGSHSCTCKVGYTGEDCAKELFPPTALKMERVEESGVSISWNPPNGPAARQMLDGYAVTYVSSDGSYRRTDFVDRTRSSHQLQALAAGRAYNISVFSVKRNSNNKNDISRPAVLLARTRPRPVEGFEVTNVTASTISVQWALHRIRHATVSGVRVSIRHPEALRDQATDVDRSVDRFTFRALLPGKRYTIQLTTLSGLRGEEHPTESLATAPTHVWTRPLPPANLTAARVTATSAHVVWDAPTPGSLLEAYVINVTTSQSTKSRYVPNGKLASYTVRDLLPGRRYQLSVIAVQSTELGPQHSEPAHLYIITSPRDGADRRWHQGGHHPRVLKNRPPPARLPELRLLNDHSAPETPTQPPRFSELVDGRGRVSARFGGSPSKAATVRSQPTASAQLENMEEAPKRVSLALQLPEHGSKDIGNVPGNCSENPCQNGGTCVPGADAHSCDCGPGFKGRRCELACIKVSRPCTRLFSETKAFPVWEGGVCHHVYKRVYRVHQDICFKESCESTSLKKTPNRKQSKSQTLEKS

SEQ ID NO: 36207 - protein, 300 aa, Homo sapiens
  REGION 1..300: note = ENSP00000384789
  VARIANT 1: note = Any amino acid
XSLPHVSDVNECASQPCQNGGTCTHGINSFRCQCPAGFGGPTCETAQSPCDTKECQHGGQCQVENGSAVCVCQAGYTGAACEMDVDDCSPDPCLNGGSCVDLVGNYTCLCAEPFKGLRCETGDHPVPDACLSAPCHNGGTCVDADQGYVCECPEGFMGLDCRERVPDDCECRNGGRCLGANTTLCQCPLGFFGLLCEFEITAMPCNMNTQCPDGGYCMEHGGSYLCVCHTDHNASHSLPSPCDSDPCFNGGSCDAHDDSYTCECPRGFHGKHCEKARPHLCSSGPCRNGGTCKEAGGEYH

SEQ ID NO: 36208 - protein, 272 aa, Homo sapiens
  REGION 1..272: note = ENSP00000401865
  VARIANT 1: note = Any amino acid
XPTCETAQSPCDTKECQHGGQCQVENGSAVCVCQAGYTGAACEMDVDDCSPDPCLNGGSCVDLVGNYTCLCAEPFKGLRCETGDHPVPDACLSAPCHNGGTCVDADQGYVCECPEGFMGLDCRERVPDDCECRNGGRCLGANTTLCQCPLGFFGLLCEFEITAMPCNMNTQCPDGGYCMEHGGSYLCVCHTDHNASHSLPSPCDSDPCFNGGSCDAHDDSYTCECPRGFHGKHCEKGMAGRGVRAGVSTLESARGPPSCFSAVSLLVSRIAD

SEQ ID NO: 36209 - protein, 66 aa, Homo sapiens
  REGION 1..66: note = ENSP00000394324
QCQVENGSAVCVCQAGYTGAACEMDVDDCSPDPCLNGGSCVDLVGNYTCLCAEPFKGLRCETVVTC

SEQ ID NO: 36210 - protein, 599 aa, Homo sapiens
  REGION 1..599: note = ENSP00000342992
MHGILGACGRLRLEPATPLTPLLCAERDECRAHPCRNGGSCRNLPGAYVCRCPAGFVGVHCETEVDACDSSPCQHGGRCESGGGAYLCVCPESFFGYHCETVSDPCFSSPCGGRGYCLASNGSHSCTCKVGYTGEDCAKELFPPTALKMERVEESGVSISWNPPNGPAARQMLDGYAVTYVSSDGSYRRTDFVDRTRSSHQLQALAAGRAYNISVFSVKRNSNNKNDISRPAVLLARTRPRPVEGFEVTNVTASTISVQWALHRIRHATVSGVRVSIRHPEALRDQATDVDRSVDRFTFRALLPGKRYTIQLTTLSGLRGEEHPTESLATAPTHVWTRPLPPANLTAARVTATSAHVVWDAPTPGSLLEAYVINVTTSQSTKSRYVPNGKLASYTVRDLLPGRRYQLSVIAVQSTELGPQHSEPAHLYIITSPRDGADRRWHQGGHHPRVLKNRPPPARLPELRLLNDHSAPETPTQPPRFSELVDGRGRVSARFGGSPSKAATVRSHVPGNCSENPCQNGGTCVPGADAHSCDCGPGFKGRRCELACIKVSRPCTRLFSETKAFPVWEGGVCHHVYKRVYRVHQDICFKESCESTSLK

SEQ ID NO: 36211 - protein, 538 aa, Homo sapiens [sequence omitted]

SEQ ID NO: 36212 - protein, 538 aa, Homo sapiens [sequence omitted]

SEQ ID NO: 36213 - protein, 28 aa, Homo sapiens
  REGION 1..28: note = ENSP00000429292
MAVAAAAAAAGPAGAGGGRAQRSGLLEV

SEQ ID NO: 36214 - protein, 193 aa, Homo sapiens
  REGION 1..193: note = ENSP00000323435
MLEVHIPSVGPEAEGPRQSPEKSHMVFRVEVLCSGRRHTVPRRYSEFHALHKRIKKLYKVPDFPSKRLPNWRTRGLEQRRQGLEAYIQGILYLNQEVPKELLEFLRLRHFPTDPKASNWGTLREFLPGDSSSQQHQRPVLSFHVDPYVCNPSPESLPNVVVNGVLQGLYSFSISPDKAQPKAACHPAPLPPMP

SEQ ID NO: 36215 - protein, 120 aa, Homo sapiens
  REGION 1..120: note = ENSP00000452692
MLEVHIPSVGPEAEGPRQSPEKSHMVFRVEVLCSGRRHTVPRRYSEFHALHKRIKKLYKVPDFPSKRLPNWRTRGLEQRRQGLEAYIQGILYLNQEVPKELLEFLRLRHFPTDPKASNWG

SEQ ID NO: 36216 - protein, 574 aa, Homo sapiens
  REGION 1..574: note = ENSP00000311427
MALKGRALYDFHSENKEEISIQQDEDLVIFSETSLDGWLQGQNSRGETGLFPASYVEIVRSGISTNHADYSSSPAGSPGAQVSLYNSPSVASPARSGGGSGFLSNQGSFEEDDDDDWDDWDDGCTVVEEPRAGGLGTNGHPPLNLSYPGAYPSQHMAFRPKPPLERQDSLASAKRGSVVGRNLNRFSCFVRSGVEAFILGDVPMMAKIAETYSIEMGPRGPQWKANPHPFACSVEDPTKQTKFKGIKSYISYKLTPTHAASPVYRRYKHFDWLYNRLLHKFTVISVPHLPEKQATGRFEEDFIEKRKRRLILWMDHMTSHPVLSQYEGFQHFLSCLDDKQWKMGKRRAEKDEMVGASFLLTFQIPTEHQDLQDVEDRVDTFKAFSKKMDDSVLQLSTVASELVRKHVGGFRKEFQKLGSAFQAISHSFQMDPPFCSEALNSAISHTGRTYEAIGEMFAEQPKNDLFQMLDTLSLYQGLLSNFPDIIHLQKGAFAKVKESQRMSDEGRMVQDEADGIRRRCRVVGFALQAEMNHFHQRRELDFKHMMQNYLRQQILFYQRVGQQLEKTLRMYDNL

SEQ ID NO: 36217 - protein, 283 aa, Homo sapiens
  REGION 1..283: note = ENSP00000455436
  VARIANT 1: note = Any amino acid
XRGPQWKANPHPFACSVEDPTKQTKFKGIKSYISYKLTPTHAASPVYRRYKHFDWLYNRLLHKFTVISVPHLPEKQATGRFEEDFIEKRKRRLILWMDHMTSHPVLSQYEGFQHFLSCLDDKQWKMGKRRAEKDEMVGASFLLTFQIPTEHQDLQDVEDRVDTFKAFSKKMDDSVLQLSTVASELGLLSNFPDIIHLQKGAFAKVKESQRMSDEGRMVQDEADGIRRRCRVVGFALQAEMNHFHQRRELDFKHMMQNYLRQQILFYQRVGQQLEKTLRMYDNL

SEQ ID NO: 36218 - protein, 550 aa, Homo sapiens
  REGION 1..550: note = ENSP00000356591
MVGEEKMSLRNRLSKSRENPEEDEDQRNPAKESLETPSNGRIDIKQLIAKKIKLTAEAEELKPFFMKEVGSHFDDFVTNLIEKSASLDNGGCALTTFSVLEGEKNNHRAKDLRAPPEQGKIFIARRSLLDELLEVDHIRTIYHMFIALLILFILSTLVVDYIDEGRLVLEFSLLSYAFGKFPTVVWTWWIMFLSTFSVPYFLFQHWATGYSKSSHPLIRSLFHGFLFMIFQIGVLGFGPTYVVLAYTLPPASRFIIIFEQIRFVMKAHSFVRENVPRVLNSAKEKSSTVPIPTVNQYLYFLFAPTLIYRDSYPRNPTVRWGYVAMKFAQVFGCFFYVYYIFERLCAPLFRNIKQEPFSARVLVLCVFNSILPGVLILFLTFFAFLHCWLNAFAEMLRFGDRMFYKDWWNSTSYSNYYRTWNVVVHDWLYYYAYKDFLWFFSKRFKSAAMLAVFAVSAVVHEYALAVCLSFFYPVLFVLFMFFGMAFNFIVNDSRKKPIWNVLMWTSLFLGNGVLLCFYSQEWYARQHCPLKNPTFLDYVRPRSWTCRYVF

SEQ ID NO: 36219 - protein, 260 aa, Homo sapiens
  REGION 1..260: note = ENSP00000411309
MVGEEKMSLRNRLSKSRENPEEDEDQRNPAKESLETPSNGRIDIKQLIAKKIKLTAEAEELKPFFMKEVGSHFDDFVTNLIEKSASLDNGGCALTTFSVLEGEKNNHRAKDLRAPPEQGKIFIARRSLLDELLEVDHIRTIYHMFIALLILFILSTLVVDYIDEGRLVLEFSLLSYAFGKFPTVVWTWWIMFLSTFSVPYFLFQHWATGYSKSSHPLIRSLFHGFLFMIFQIGVLGFGPTYVVLAYTLPPASRFIIIFEQ

SEQ ID NO: 36220 - protein, 492 aa, Homo sapiens
  REGION 1..492: note = ENSP00000445315
MELKPFFMKEVGSHFDDFVTNLIEKSASLDNGGCALTTFSVLEGEKNNHRAKDLRAPPEQGKIFIARRSLLDELLEVDHIRTIYHMFIALLILFILSTLVVDYIDEGRLVLEFSLLSYAFGKFPTVVWTWWIMFLSTFSVPYFLFQHWATGYSKSSHPLIRSLFHGFLFMIFQIGVLGFGPTYVVLAYTLPPASRFIIIFEQIRFVMKAHSFVRENVPRVLNSAKEKSSTVPIPTVNQYLYFLFAPTLIYRDSYPRNPTVRWGYVAMKFAQVFGCFFYVYYIFERLCAPLFRNIKQEPFSARVLVLCVFNSILPGVLILFLTFFAFLHCWLNAFAEMLRFGDRMFYKDWWNSTSYSNYYRTWNVVVHDWLYYYAYKDFLWFFSKRFKSAAMLAVFAVSAVVHEYALAVCLSFFYPVLFVLFMFFGMAFNFIVNDSRKKPIWNVLMWTSLFLGNGVLLCFYSQEWYARQHCPLKNPTFLDYVRPRSWTCRYVF

SEQ ID NO: 36221 - protein, 485 aa, Homo sapiens
  REGION 1..485: note = ENSP00000441356
MKEVGSHFDDFVTNLIEKSASLDNGGCALTTFSVLEGEKNNHRAKDLRAPPEQGKIFIARRSLLDELLEVDHIRTIYHMFIALLILFILSTLVVDYIDEGRLVLEFSLLSYAFGKFPTVVWTWWIMFLSTFSVPYFLFQHWATGYSKSSHPLIRSLFHGFLFMIFQIGVLGFGPTYVVLAYTLPPASRFIIIFEQIRFVMKAHSFVRENVPRVLNSAKEKSSTVPIPTVNQYLYFLFAPTLIYRDSYPRNPTVRWGYVAMKFAQVFGCFFYVYYIFERLCAPLFRNIKQEPFSARVLVLCVFNSILPGVLILFLTFFAFLHCWLNAFAEMLRFGDRMFYKDWWNSTSYSNYYRTWNVVVHDWLYYYAYKDFLWFFSKRFKSAAMLAVFAVSAVVHEYALAVCLSFFYPVLFVLFMFFGMAFNFIVNDSRKKPIWNVLMWTSLFLGNGVLLCFYSQEWYARQHCPLKNPTFLDYVRPRSWTCRYVF

SEQ ID NO: 36222 - protein, 873 aa, Homo sapiens
  REGION 1..873: note = ENSP00000318900
MAEMEKEGRPPENKRSRKPAHPVKREINEEMKNFAENTMNELLGWYGYDKVELKDGEDIEFRSYPTDGESRQHISVLKENSLPKPKLPEDSVISPYNISTGYSGLATGNGLSDSPAGSKDHGSVPIIVPLIPPPFIKPPAEDDVSNVQIMCAWCQKVGIKRYSLSMGSEVKSFCSEKCFAACRRAYFKRNKARDEDGHAENFPQQHYAKETPRLAFKNNCELLVCDWCKHIRHTKEYLDFGDGERRLQFCSAKCLNQYKMDIFYKETQANLPAGLCSTLHPPMENKAEGTGVQLLTPDSWNIPLTDARRKAPSPVATAGQSQGPGPSASTTVSPSDTANCSVTKIPTPVPKSIPISETPNIPPVSVQPPASIGPPLGVPPRSPPMVMTNRGPVPLPIFMEQQIMQQIRPPFIRGPPHHASNPNSPLSNPMLPGIGPPPGGPRNLGPTSSPMHRPMLSPHIHPPSTPTMPGNPPGLLPPPPPGAPLPSLPFPPVSMMPNGPMPVPQMMNFGLPSLAPLVPPPTLLVPYPVIVPLPVPIPIPIPIPHVSDSKPPNGFSSNGENFIPNAPGDSAAAGGKPSGHSLSPRDSKQGSSKSADSPPGCSGQALSLAPTPAEHGRSEVVDLTRRAGSPPGPPGAGGQLGFPGVLQGPQDGVIDLTVGHRARLHNVIHRALHAHVKAEREPSAAERRTCGGCRDGHCSPPAAGDPGPGAPAGPEAAAACNVIVNGTRGAAAEGAKSAEPPPEQPPPPPPPAPPKKLLSPEEPAVSELESVKENNCASNCHLDGEAAKKLMGEEALAGGDKSDPNLNNPADEDHAYALRMLPKTGCVIQPVPKPAEKAAMAPCIISSPMLSAGPEDLEPPLKRRCLRIRNQNK

SEQ ID NO: 36223 - protein, 149 aa, Homo sapiens
  REGION 1..149: note = ENSP00000478366
MAEMEKEGRPPENKRSRKPAHPVKREINEEMKNFAENTMNELLGWYGYDKVELKDGEDIEFRSYPTDGESRQHISVLKENSLPKPKLPEDSVISPYNISTGYSGLATGNGLSDSPAGSKDHGSVPIIVPLIPPPFIKPPADEKTEAQKS

SEQ ID NO: 36224 - protein, 198 aa, Homo sapiens
  REGION 1..198: note = ENSP00000339428
MTLRCLEPSGNGGEGTRSQWGTAGSAEEPSPQAARLAKALRELGQTGWYWGSMTVNEAKEKLKEAPEGTFLIRDSSHSDYLLTISVKTSAGPTNLRIEYQDGKFRLDSIICVKSKLKQFDSVVHLIDYYVQMCKDKRTGPEAPRNGTVHLYLTKPLYTSAPSLQHLCRLTINKCTGAIWGLPLPTRLKDYLEEYKFQV

SEQ ID NO: 36225 - protein, 198 aa, Homo sapiens; identical to SEQ ID NO: 36224
  REGION 1..198: note = ENSP00000448815

SEQ ID NO: 36226 - protein, 198 aa, Homo sapiens; identical to SEQ ID NO: 36224
  REGION 1..198: note = ENSP00000442898

SEQ ID NO: 36227 - protein, 142 aa, Homo sapiens
  REGION 1..142: note = ENSP00000447902
MTLRCLEPSGNGGEGTRSQWGTAGSAEEPSPQAARLAKALRELGQTGWYWGSMTVNEAKEKLKEAPEGTFLIRDSSHSDYLLTISVKTSAGPTNLRIEYQDGKFRLDSIICVKSKLKQFDSVVHLIDYYVQMCKDKRTGPEA

SEQ ID NO: 36228 - protein, 198 aa, Homo sapiens; identical to SEQ ID NO: 36224
  REGION 1..198: note = ENSP00000447161

SEQ ID NO: 36229 - protein, 102 aa, Homo sapiens
  REGION 1..102: note = ENSP00000448709
MTLRCLEPSGNGGEGTRSQWGTAGSAEEPSPQAARLAKALRELGQTGREPIGRDACGRERLPKEAARKRGRGGKQRIRWKYVPCFQGTAESTLAGSWVLGNA

SEQ ID NO: 36230 - protein, 161 aa, Homo sapiens
  REGION 1..161: note = ENSP00000448611
MTLRCLEPSGNGGEGTRSQWGTAGSAEEPSPQAARLAKALRELGQTGWYWGSMTVNEAKEKLKEAPEGTFLIRDSSHSDYLLTISVKTSAGPTNLRIEYQDGKFRLDSIICVKSKLKQFDSVVHLIDYYVQMCKDKRTGPEAPRNGTVHLYLTKPLYTSAP

SEQ ID NO: 36231 - protein, 198 aa, Homo sapiens; identical to SEQ ID NO: 36224
  REGION 1..198: note = ENSP00000449227

SEQ ID NO: 36232 - skipped

SEQ ID NO: 36233 - protein, 116 aa, Homo sapiens
  REGION 1..116: note = ENSP00000474805
  VARIANT 1: note = Any amino acid
XYVQMCKDKRTGPEAPRNGTVHLYLTKPLYTSAPSLQHLCRLTINKCTGAIWGLPLPTRLKDYLEEYKFQVQAPVGEKELLIGILKKWEGTKLTQASLQFDMPADQSLLGILYFAF

SEQ ID NO: 36234 - protein, 46 aa, Homo sapiens
  REGION 1..46: note = ENSP00000474888
  VARIANT 1: note = Any amino acid
XAPSLQHLCRLTINKCTGAIWGLPLPTRLKDYLEEYKFQPAVFYPG

SEQ ID NO: 36235 - protein, 198 aa, Homo sapiens; identical to SEQ ID NO: 36224
  REGION 1..198: note = ENSP00000481249

SEQ ID NO: 36236 - protein, 154 aa, Homo sapiens [sequence omitted]

SEQ ID NO: 36237 - protein, 135 aa, Homo sapiens
  REGION 1..135: note = ENSP00000374645
MATKAESNGPVKVWGSIKGLTEGLHGFHVHEFGDNTAGCTSAGPHFNPLSRKHGGPKDEERHVGDLGNVTADKDGVADVSIEDSVISLSGDHCIIGRTLVVHEKADDLGKGGNEESTKTGNAGSRLACGVIGIAQ

SEQ ID NO: 36238 - protein, 54 aa, Homo sapiens
  REGION 1..54: note = ENSP00000472134
MLALLCSCLLLAAGASDAWTGEDSAEPNSDSAEWIRDMYAKVTEIWQEVMQRRD

SEQ ID NO: 36239 - protein, 240 aa, Homo sapiens
  REGION 1..240: note = ENSP00000371554
MLALLCSCLLLAAGASDAWTGEDSAEPNSDSAEWIRDMYAKVTEIWQEVMQRRDDDGALHAACQVQPSATLDAAQPRVTGVVLFRQLAPRAKLDAFFALEGFPTEPNSSSRAIHVHQFGDLSQGCESTGPHYNPLAVPHPQHPGDFGNFAVRDGSLWRYRAGLAASLAGPHSIVGRAVVVHAGEDDLGRGGNQASVENGNAGRRLACCVVGVCGPGLWERQAREHSERKKRRRESECKAA

SEQ ID NO: 36240 - protein, 731 aa, Homo sapiens
  REGION 1..731: note = ENSP00000322182
MSVTLTSVKRVQSSPNLLAAGRDSQSPDSAWRSYNDGNQETLNGDATYSSLAAKGFRSVRPNLQDKRSPTQSQITVNGNSGGAVSPMSYYQRPFSPSAYSLPASLNSSIVMQHGTSLDSTDTYPQHAQSLDGTTSSSIPLYRSSEEEKRVTVIKAPHYPGIGPVDESGIPTAIRTTVDRPKDWYKTMFKQIHMVHKPDDDTDMYNTPYTYNAGLYNPPYSAQSHPAAKTQTYRPLSKSHSDNSPNAFKDASSPVPPPHVPPPVPPLRPRDRSSTEKHDWDPPDRKVDTRKFRSEPRSIFEYEPGKSSILQHERPPPLPTTPTPVPREPGRKPLSSSRLGEVTGSPSPPPRSGAPTPSSRAPALSPTRPPKKPLDYVQDHSSGVFNEASLYQSSIDRSLERPMSSASMASDFRKRRKSEPAVGPPRGLGDQSASRTSPGRVDLPGSSTTLTKSFTSSSPSSPSRAKDRESPRSYSSTLTDMGRSAPRERRGTPEKEKLPAKAVYDFKAQTSKELSFKKGDTVYILRKIDQNWYEGEHHGRVGIFPISYVEKLTPPEKAQPARPPPPAQPGEIGEAIAKYNFNADTNVELSLRKGDRVILLKRVDQNWYEGKIPGTNRQGIFPVSYVEVVKKNTKGAEDYPDPPIPHSYSSDRIHSLSSNKPQRPVFTHENIQGGGEPFQALYNYTPRNEDELELRESDVIDVMEKCDDGWFVGTSRRTKFFGTFPGNYVKRL

SEQ ID NO: 36241 - protein, 644 aa, Homo sapiens
  REGION 1..644: note = ENSP00000397262
MSVTLTSVKRVQSSPNLLAAGRDSQSPDSAWRSYNDGNQETLNGDATYSSLAAKGFRSVRPNLQDKRSPTQSQITVNGNSGGAVSPMSYYQRPFSPSAYSLPASLNSSIVMQHGTSLDSTDTYPQHAQSLDGTTSSSIPLYRSSEEEKRVTVIKAPHYPGIGPVDESGIPTAIRTTVDRPKDWYKTMFKQIHMVHKPGLYNPPYSAQSHPAAKTQTYRPLSKSHSDNSPNAFKDASSPVPPPHVPPPVPPLRPRDRSSTEKHDWDPPDRKVDTRKFRSEPRSIFEYEPGKSSILQHERPASLYQSSIDRSLERPMSSASMASDFRKRRKSEPAVGPPRGLGDQSASRTSPGRVDLPGSSTTLTKSFTSSSPSSPSRAKDRESPRSYSSTLTDMGRSAPRERRGTPEKEKLPAKAVYDFKAQTSKELSFKKGDTVYILRKIDQNWYEGEHHGRVGIFPISYVEKLTPPEKAQPARPPPPAQPGEIGEAIAKYNFNADTNVELSLRKGDRVILLKRVDQNWYEGKIPGTNRQGIFPVSYVEVVKKNTKGAEDYPDPPIPHSYSSDRIHSLSSNKPQRPVFTHENIQGGGEPFQALYNYTPRNEDELELRESDVIDVMEKCDDGWFVGTSRRTKFFGTFPGNYVKRL

SEQ ID NO: 36242 - protein, 1200 aa, Homo sapiens
  REGION 1..1200: note = ENSP00000347852
MNTDSGGCARKRAAMSVTLTSVKRVQSSPNLLAAGRDSQSPDSAWRSYNDGNQETLNGDATYSSLAAKGFRSVRPNLQDKRSPTQSQITVNGNSGGAVSPMSYYQRPFSPSAYSLPASLNSSIVMQHGTSLDSTDTYPQHAQSLDGTTSSSIPLYRSSEEEKRVTVIKAPHYPGIGPVDESGIPTAIRTTVDRPKDWYKTMFKQIHMVHKPDDDTDMYNTPYTYNAGLYNPPYSAQSHPAAKTQTYRPLSKSHSDNSPNAFKDASSPVPPPHVPPPVPPLRPRDRSSTEKHDWDPPDRKVDTRKFRSEPRSIFEYEPGKSSILQHERPASLYQSSIDRSLERPMSSASMASDFRKRRKSEPAVGPPRGLGDQSASRTSPGRVDLPGSSTTLTKSFTSSSPSSPSRAKGGDDSKICPSLCSYSGLNGNPSSELDYCSTYRQHLDVPRDSPRAISFKNGWQMARQNAEIWSSTEETVSPKIKSRSCDDLLNDDCDSFPDPKVKSESMGSLLCEEDSKESCPMAWGSPYVPEVRSNGRSRIRHRSARNAPGFLKMYKKMHRINRKDLMNSEVICSVKSRILQYESEQQHKDLLRAWSQCSTEEVPRDMVPTRISEFEKLIQKSKSMPNLGDDMLSPVTLEPPQNGLCPKRRFSIEYLLEEENQSGPPARGRRGCQSNALVPIHIEVTSDEQPRAHVEFSDSDQDGVVSDHSDYIHLEGSSFCSESDFDHFSFTSSESFYGSSHHHHHHHHHHHRHLISSCKGRCPASYTRFTTMLKHERARHENTEEPRRQEMDPGLSKLAFLVSPVPFRRKKNSAPKKQTEKAKCKASVFEALDSALKDICDQIKAEKKRGSLPDNSILHRLISELLPDVPERNSSLRALRRSPLHQPLHPLPPDGAIHCPPYQNDCGRMPRSASFQDVDTANSSCHHQDRGGALQDRESPRSYSSTLTDMGRSAPRERRGTPEKEKLPAKAVYDFKAQTSKELSFKKGDTVYILRKIDQNWYEGEHHGRVGIFPISYVEKLTPPEKAQPARPPPPAQPGEIGEAIAKYNFNADTNVELSLRKGDRVILLKRVDQNWYEGKIPGTNRQGIFPVSYVEVVKKNTKGAEDYPDPPIPHSYSSDRIHSLSSNKPQRPVFTHENIQGGGEPFQALYNYTPRNEDELELRESDVIDVMEKCDDGWFVGTSRRTKFFGTFPGNYVKRL

SEQ ID NO: 36243 - protein, 666 aa, Homo sapiens
  REGION 1..666: note = ENSP00000377162
MNTGRDSQSPDSAKGFRSVRPNLQDKRSPTQSQITVNGNSGGAVSPMSYYQRPFSPSAYSLPASLNSSIVMQHGTSLDSTDTYPQHAQSLDGTTSSSIPLYRSSEEEKRVTVIKAPHYPGIGPVDESGIPTAIRTTVDRPKDWYKTMFKQIHMVHKPDDDTDMYNTPYTYNAGLYNPPYSAQSHPAAKTQTYRPLSKSHSDNSPNAFKDASSPVPPPHVPPPVPPLRPRDRSSTEKHDWDPPDRKVDTRKFRSEPRSIFEYEPGKSSILQHERPTDRINPDDIDLENEPWYKFFSELEFGRPPPKKPLDYVQDHSSGVFNEASLYQSSIDRSLERPMSSASMASDFRKRRKSEPAVGPPRGLGDQSASRTSPGRVDLPGSSTTLTKSFTSSSPSSPSRAKDRESPRSYSSTLTDMGRSAPRERRGTPEKEKLPAKAVYDFKAQTSKELSFKKGDTVYILRKIDQNWYEGEHHGRVGIFPISYVEKLTPPEKAQPARPPPPAQPGEIGEAIAKYNFNADTNVELSLRKGDRVILLKRVDQNWYEGKIPGTNRQGIFPVSYVEVVKKNTKGAEDYPDPPIPHSYSSDRIHSLSSNKPQRPVFTHENIQGGGEPFQALYNYTPRNEDELELRESDVIDVMEKCDDGWFVGTSRRTKFFGTFPGNYVKRL

SEQ ID NO: 36244 - protein, 636 aa, Homo sapiens
  REGION 1..636: note = ENSP00000321983
MNTGRDSQSPDSAKGFRSVRPNLQDKRSPTQSQITVNGNSGGAVSPMSYYQRPFSPSAYSLPASLNSSIVMQHGTSLDSTDTYPQHAQSLDGTTSSSIPLYRSSEEEKRVTVIKAPHYPGIGPVDESGIPTAIRTTVDRPKDWYKTMFKQIHMVHKPDDDTDMYNTPYTYNAGLYNPPYSAQSHPAAKTQTYRPLSKSHSDNSPNAFKDASSPVPPPHVPPPVPPLRPRDRSSTEKHDWDPPDRKVDTRKFRSEPRSIFEYEPGKSSILQHERPPPLPTTPTPVPREPGRKPLSSSRLGEVTGSPSPPPRSGAPTPSSRAPALSPTRPPKKPLDYVQDHSSGVFNEASLYQSSIDRSLERPMSSASMASDFRKRRKSEPAVGPPRGLGDQSASRTSPGRVDLPGSSTTLTKSFTSSSPSSPSRAKDRESPRSYSSTLTDMGRSAPRERRGTPEKEKLPAKAVYDFKAQTSKELSFKKGDTVYILRKIDQNWYEGEHHGRVGIFPISYVEKLTPPEKAQPARPPPPAQPGEIGEAIAKYNFNADTNVELSLRKGDRVILLKRVDQNWYEGKIPGTNRQGIFPVSYVEVVKKNTKGAEDYPDPPIPHSYSSDRIHSLSSNKPQRPVFTHENIQGGGEP

SEQ ID NO: 36245 - protein, 291 aa, Homo sapiens
  REGION 1..291: note = ENSP00000401818
QTYRPLSKSHSDNSPNAFKDASSPVPPPHVPPPVPPLRPRDRSSTEKHDWDPPDRKVDTRKFRSEPRSIFEYEPGKSSILQHERPPPKKPLDYVQDHSSGVFNEASLYQSSIDRSLERPMSSASMASDFRKRRKSEPAVGPPRGLGDQSASRTSPGRVDLPGSSTTLTKSFTSSSPSSPSRAKDRESPRSYSSTLTDMGRSAPRERRGTPEKEKLPAKAVYDFKAQTSKELSFKKGDTVYILRKIDQNWYEGEHHGRVGIFPISYVEKLTPPEKAQPARPPPPAQPGEIGE

SEQ ID NO: 36246 - protein, 291 aa, Homo sapiens
  REGION 1..291: note = ENSP00000389995
  VARIANT 1: note = Any amino acid
XSEEEKRVTVIKAPHYPGIGPVDESGIPTAIRTTVDRPKDWYKTMFKQIHMVHKPDDDTDMYNTPYTYNAGLYNPPYSAQSHPAAKTQTYRPLSKSHSDNSPNAFKDASSPVPPPHVPPPVPPLRPRDRSSTEKHDWDPPDRKVDTRKFRSEPRSIFEYEPGKSSILQHERPASLYQSSIDRSLERPMSSASMASDFRKRRKSEPAVGPPRGLGDQSASRTSPGRVDLPGSSTTLTKSFTSSSPSSPSRAKDRESPRSYSSTLTDMGRSAPRERRGTPEKEKLPAKAVYDF

SEQ ID NO: 36247 - protein, 253 aa, Homo sapiens
  REGION 1..253: note = ENSP00000391940
  VARIANT 1: note = Any amino acid
XQIHMVHKPDDDTDMYNTPYTYNAGLYNPPYSAQSHPAAKTQTYRPLSKSHSDNSPNAFKDASSPVPPPHVPPPVPPLRPRDRSSTEKHDWDPPDRKVDTRKFRSEPRSIFEYEPGKSSILQHERPPPLPTTPTPVPREPGRKPLSSSRLGEVTGSPSPPPRSGAPTPSSRAPALSPTRSSIDRSLERPMSSASMASDFRKRRKSEPAVGPPRGLGDQSASRTSPGRVDLPGSSTTLTKSFTSSSPSSPSRAK

SEQ ID NO: 36248 - protein, 100 aa, Homo sapiens
  REGION 1..100: note = ENSP00000399048
MSYYQRPFSPSAYSLPASLNSSIVMQHGTSLDSTDTYPQHAQSLDGTTSSSIPLYRSSEEEKRVTVIKAPHYPGIGPVDESGIPTAIRTTVDRPKDWYKT

SEQ ID NO: 36249 - protein, 93 aa, Homo sapiens
  REGION 1..93: note = ENSP00000408909
MSYYQRPFSPSAYSLPASLNSSIVMQHGTSLDSTDTYPQHAQSLDGTTSSSIPLYRSSEEEKRVTVIKAPHYPGIGPVDESGIPTAIRTTVDR

SEQ ID NO: 36250 - protein, 89 aa, Homo sapiens
  REGION 1..89: note = ENSP00000410483
MSYYQRPFSPSAYSLPASLNSSIVMQHGTSLDSTDTYPQHAQSLDGTTSSSIPLYRSSEEEKRVTVIKAPHYPGIGPVDESGIPTAIRT

SEQ ID NO: 36251 - protein, 119 aa, Homo sapiens
  REGION 1..119: note = ENSP00000405349
MNTGRDSQSPDSAKGFRSVRPNLQDKRSPTQSQITVNGNSGGAVSPMSYYQRPFSPSAYSLPASLNSSIVMQHGTSLDSTDTYPQHAQSLDGTTSSSIPLYRSSEEEKRVTVIKAPHYP

SEQ ID NO: 36252 - protein, 73 aa, Homo sapiens
  REGION 1..73: note = ENSP00000415680
MSYYQRPFSPSAYSLPASLNSSIVMQHGTSLDSTDTYPQHAQSLDGTTSSSIPLYRSSEEEKRVTVIKAPHYP

SEQ ID NO: 36253 - protein, 68 aa, Homo sapiens
  REGION 1..68: note = ENSP00000397664
MSYYQRPFSPSAYSLPASLNSSIVMQHGTSLDSTDTYPQHAQSLDGTTSSSIPLYRSSEEEKRVTVIK

SEQ ID NO: 36254 - protein, 59 aa, Homo sapiens
  REGION 1..59: note = ENSP00000398335
MSYYQRPFSPSAYSLPASLNSSIVMQHGTSLDSTDTYPQHAQSLDGTTSSSIPLYRSSE

SEQ ID NO: 36255 - protein, 55 aa, Homo sapiens
  REGION 1..55: note = ENSP00000410967
MSYYQRPFSPSAYSLPASLNSSIVMQHGTSLDSTDTYPQHAQSLDGTTSSSIPLY

SEQ ID NO: 36256 - protein, 121 aa, Homo sapiens
  REGION 1..121: note = ENSP00000415637
MNTGRDSQSPDSAWRSYNDGNQETLNGDATYSSLAAKGFRSVRPNLQDKRSPTQSQITVNGNSGGAVSPMSYYQRPFSPSAYSLPASLNSSIVMQHGTSLDSTDTYPQHAQSLDGTTSSSI

SEQ ID NO: 36257 - protein, 120 aa, Homo sapiens
  REGION 1..120: note = ENSP00000416464
MNTGRDSQSPDSAWRSYNDGNQETLNGDATYSSLAAKGFRSVRPNLQDKRSPTQSQITVNGNSGGAVSPMSYYQRPFSPSAYSLPASLNSSIVMQHGTSLDSTDTYPQHAQSLDGTTSSS

SEQ ID NO: 36258 - protein, 109 aa, Homo sapiens
  REGION 1..109: note = ENSP00000405092
MNTGRDSQSPDSAWRSYNDGNQETLNGDATYSSLAAKGFRSVRPNLQDKRSPTQSQITVNGNSGGAVSPMSYYQRPFSPSAYSLPASLNSSIVMQHGTSLDSTDTYPQH

SEQ ID NO: 36259 - protein, 100 aa, Homo sapiens
  REGION 1..100: note = ENSP00000396183
MSVTLTSVKRVQSSPNLLAAGRDSQSPDSAKGFRSVRPNLQDKRSPTQSQITVNGNSGGAVSPMSYYQRPFSPSAYSLPASLNSSIVMQHGTSLDSTDTY

SEQ ID NO: 36260 - protein, 116 aa, Homo sapiens
  REGION 1..116: note = ENSP00000403417
MSVTLTSVKRVQSSPNLLAAGRDSQSPDSAWRSYNDGNQETLNGDATYSSLAAKGFRSVRPNLQDKRSPTQSQITVNGNSGGAVSPMSYYQRPFSPSAYSLPASLNSSIVMQHGTS

SEQ ID NO: 36261 - protein, 113 aa, Homo sapiens
  REGION 1..113: note = ENSP00000408504
MNTDSGGCARKRAAMSVTLTSVKRVQSSPNLLAAGRDSQSPDSAWRSYNDGNQETLNGDATYSSLAAKGFRSVRPNLQDKRSPTQSQITVNGNSGGAVSPMSYYQRPFSPSAY

SEQ ID NO: 36262 - protein, 9 aa, Homo sapiens
  REGION 1..9: note = ENSP00000377158
MSYYQRPFS

SEQ ID NO: 36263 - protein, 107 aa, Homo sapiens
  REGION 1..107: note = ENSP00000410233
MNTDSGGCARKRAAMSVTLTSVKRVQSSPNLLAAGRDSQSPDSAWRSYNDGNQETLNGDATYSSLAAKGFRSVRPNLQDKRSPTQSQITVNGNSGGAVSPMSYYQRP

SEQ ID NO: 36264 - protein, 75 aa, Homo sapiens
  REGION 1..75: note = ENSP00000405646
MNTDSGGCARKRAAMSVTLTSVKRVQSSPNLLAAGRDSQSPDSAKGFRSVRPNLQDKRSPTQSQITVNGNSGGAV

SEQ ID NO: 36265 - protein, 96 aa, Homo sapiens
  REGION 1..96: note = ENSP00000405314
MNTDSGGCARKRAAMSVTLTSVKRVQSSPNLLAAGRDSQSPDSAWRSYNDGNQETLNGDATYSSLAAKGFRSVRPNLQDKRSPTQSQITVNGNSGG

SEQ ID NO: 36266 - protein, 80 aa, Homo sapiens
  REGION 1..80: note = ENSP00000405432
MSVTLTSVKRVQSSPNLLAAGRDSQSPDSAWRSYNDGNQETLNGDATYSSLAAKGFRSVRPNLQDKRSPTQSQITVNGNS

SEQ ID NO: 36267 - protein, 80 aa, Homo sapiens; identical to SEQ ID NO: 36266
  REGION 1..80: note = ENSP00000415166

SEQ ID NO: 36268 - protein, 80 aa, Homo sapiens; identical to SEQ ID NO: 36266
  REGION 1..80: note = ENSP00000415392

SEQ ID NO: 36269 - protein, 87 aa, Homo sapiens
  REGION 1..87: note = ENSP00000407006
MNTDSGGCARKRAAMSVTLTSVKRVQSSPNLLAAGRDSQSPDSAWRSYNDGNQETLNGDATYSSLAAKGFRSVRPNLQDKRSPTQSQ

SEQ ID NO: 36270 - protein, 118 aa, Homo sapiens
  REGION 1..118: note = ENSP00000404430
MNTDSGGCARKRAAMSVTLTSVKRVQSSPNLLAAGRDSQSPDSAKGFRSVRPNLQDKRSPTQLGNQNLPASVLEVNASQTHRQTTPEASPPCPPSVVPLNRATFSPGSGTSSASLSLP

SEQ ID NO: 36271 - protein, 85 aa, Homo sapiens
  REGION 1..85: note = ENSP00000402328
MNTGRDSQSPDSAWRSYNDGNQETLNGDATYSSLAAKGFRSVRPNLQDKRSPTQLGNQNLPASVLEVNASQTHRQTTPEASPPCP

SEQ ID NO: 36272 - protein, 182 aa, Homo sapiens
  REGION 1..182: note = ENSP00000393258
MNTDSGGCARKRAAMSVTLTSVKRVQSSPNLLAAGRDSQSPDSAWRSYNDGNQETLNGDATYSSLAAKGFRSVRPNLQDKRSPTQAPPPPERKESFHSSLITSHTKGVILDQLVTNTQIPSSTEYFANKKPLQGTMYSNEDSRQTIVYSEESNTTMSYTQKITNPLPAASSTDPAPFANINT

SEQ ID NO: 36273 - protein, 71 aa, Homo sapiens
  REGION 1..71: note = ENSP00000412447
MSVTLTSVKRVQSSPNLLAAGRDSQSPDSAWRSYNDGNQETLNGDATYSSLAAKGFRSVRPNLQDKRSPTQ

SEQ ID NO: 36274 - protein, 70 aa, Homo sapiens
  REGION 1..70: note = ENSP00000390162
MSVTLTSVKRVQSSPNLLAAGRDSQSPDSAWRSYNDGNQETLNGDATYSSLAAKGFRSVRPNLQDKRSPT

SEQ ID NO: 36275 - protein, 15 aa, Homo sapiens
  REGION 1..15: note = ENSP00000389829
MNTDSGGCARKRAAM

SEQ ID NO: 36276 - protein, 1004 aa, Homo sapiens
  REGION 1..1004: note = ENSP00000397482
MKATTPLQTVDRPKDWYKTMFKQIHMVHKPGLYNPPYSAQSHPAAKTQTYRPLSKSHSDNSPNAFKDASSPVPPPHVPPPVPPLRPRDRSSTEKHDWDPPDRKVDTRKFRSEPRSIFEYEPGKSSILQHERPASLYQSSIDRSLERPMSSASMASDFRKRRKSEPAVGPPRGLGDQSASRTSPGRVDLPGSSTTLTKSFTSSSPSSPSRAKGGDDSKICPSLCSYSGLNGNPSSELDYCSTYRQHLDVPRDSPRAISFKNGWQMARQNAEIWSSTEETVSPKIKSRSCDDLLNDDCDSFPDPKVKSESMGSLLCEEDSKESCPMAWGSPYVPEVRSNGRSRIRHRSARNAPGFLKMYKKMHRINRKDLMNSEVICSVKSRILQYESEQQHKDLLRAWSQCSTEEVPRDMVPTRISEFEKLIQKSKSMPNLGDDMLSPVTLEPPQNGLCPKRRFSIEYLLEEENQSGPPARGRRGCQSNALVPIHIEVTSDEQPRAHVEFSDSDQDGVVSDHSDYIHLEGSSFCSESDFDHFSFTSSESFYGSSHHHHHHHHHHHRHLISSCKGRCPASYTRFTTMLKHERARHENTEEPRRQEMDPGLSKLAFLVSPVPFRRKKNSAPKKQTEKAKCKASVFEALDSALKDICDQIKAEKKRGSLPDNSILHRLISELLPDVPERNSSLRALRRSPLHQPLHPLPPDGAIHCPPYQNDCGRMPRSASFQDVDTANSSCHHQDRGGALQDRESPRSYSSTLTDMGRSAPRERRGTPEKEKLPAKAVYDFKAQTSKELSFKKGDTVYILRKIDQNWYEGEHHGRVGIFPISYVEKLTPPEKAQPARPPPPAQPGEIGEAIAKYNFNADTNVELSLRKGDRVILLKRVDQNWYEGKIPGTNRQGIFPVSYVEVVKKNTKGAEDYPDPPIPHSYSSDRIHSLSSNKPQRPVFTHENIQGGGEPFQALYNYTPRNEDELELRESDVIDVMEKCDDGWFVGTSRRTKFFGTFPGNYVKRL

SEQ ID NO: 36277 - protein, 661 aa, Homo sapiens
  REGION 1..661: note = ENSP00000409158
MNTGRDSQSPDSAWRSYNDGNQETLNGDATYSSLAAKGFRSVRPNLQDKRSPTQSQITVNGNSGGAVSPMSYYQRPFSPSAYSLPASLNSSIVMQHGTSLDSTDTYPQHAQSLDGTTSSSIPLYRSSEEEKRVTVIKAPHYPGIGPVDESGIPTAIRTTVDRPKDWYKTMFKQIHMVHKPDDDTDMYNTPYTYNAGLYNPPYSAQSHPAAKTQTYRPLSKSHSDNSPNAFKDASSPVPPPHVPPPVPPLRPRDRSSTEKHDWDPPDRKVDTRKFRSEPRSIFEYEPGKSSILQHERPPPKKPLDYVQDHSSGVFNEASLYQSSIDRSLERPMSSASMASDFRKRRKSEPAVGPPRGLGDQSASRTSPGRVDLPGSSTTLTKSFTSSSPSSPSRAKDRESPRSYSSTLTDMGRSAPRERRGTPEKEKLPAKAVYDFKAQTSKELSFKKGDTVYILRKIDQNWYEGEHHGRVGIFPISYVEKLTPPEKAQPARPPPPAQPGEIGEAIAKYNFNADTNVELSLRKGDRVILLKRVDQNWYEGKIPGTNRQGIFPVSYVEVVKKNTKGAEDYPDPPIPHSYSSDRIHSLSSNKPQRPVFTHENIQGGGEPFQALYNYTPRNEDELELRESDVIDVMEKCDDGWFVGTSRRTKFFGTFPGNYVKRL

SEQ ID NO: 36278 - protein, 824 aa, Homo sapiens
  REGION 1..824: note = ENSP00000396008
MYSNEDSRQTIVYSEESNTTMSYTQKITNPLPAASSTDPAPFANINTPVLQEDYRQDSQTRRISTLKLTHNQDLGSSSPISTPQFSKSVEVPSFLKRPRSLTPNPVPETHTASLSIQIAPLSGQDLESHKQLPELSPETAKIPLQQERQKSAVAAASQSSDCRVSQITVNGNSGGAVSPMSYYQRPFSPSAYSLPASLNSSIVMQHGTSLDSTDTYPQHAQSLDGTTSSSIPLYRSSEEEKRVTVIKAPHYPGIGPVDESGIPTAIRTTVDRPKDWYKTMFKQIHMVHKPDDDTDMYNTPYTYNAGLYNPPYSAQSHPAAKTQTYRPLSKSHSDNSPNAFKDASSPVPPPHVPPPVPPLRPRDRSSTEKHDWDPPDRKVDTRKFRSEPRSIFEYEPGKSSILQHERPPPLPTTPTPVPREPGRKPLSSSRLGEVTGSPSPPPRSGAPTPSSRAPALSPTRPPKKPLDYVQDHSSGVFNEASLYQSSIDRSLERPMSSASMASDFRKRRKSEPAVGPPRGLGDQSASRTSPGRVDLPGSSTTLTKSFTSSSPSSPSRAKDRESPRSYSSTLTDMGRSAPRERRGTPEKEKLPAKAVYDFKAQTSKELSFKKGDTVYILRKIDQNWYEGEHHGRVGIFPISYVEKLTPPEKAQPARPPPPAQPGEIGEAIAKYNFNADTNVELSLRKGDRVILLKRVDQNWYEGKIPGTNRQGIFPVSYVEVVKKNTKGAEDYPDPPIPHSYSSDRIHSLSSNKPQRPVFTHENIQGGGEPFQALYNYTPRNEDELELRESDVIDVMEKCDDGWFVGTSRRTKFFGTFPGNYVKRL

SEQ ID NO: 36279 - protein, 1100 aa, Homo sapiens
  REGION 1..1100: note = ENSP00000284776
MSYYQRPFSPSAYSLPASLNSSIVMQHGTSLDSTDTYPQHAQSLDGTTSSSIPLYRSSEEEKRVTVIKAPHYPGIGPVDESGIPTAIRTTVDRPKDWYKTMFKQIHMVHKPDDDTDMYNTPYTYNAGLYNPPYSAQSHPAAKTQTYRPLSKSHSDNSPNAFKDASSPVPPPHVPPPVPPLRPRDRSSTEKHDWDPPDRKVDTRKFRSEPRSIFEYEPGKSSILQHERPASLYQSSIDRSLERPMSSASMASDFRKRRKSEPAVGPPRGLGDQSASRTSPGRVDLPGSSTTLTKSFTSSSPSSPSRAKGGDDSKICPSLCSYSGLNGNPSSELDYCSTYRQHLDVPRDSPRAISFKNGWQMARQNAEIWSSTEETVSPKIKSRSCDDLLNDDCDSFPDPKVKSESMGSLLCEEDSKESCPMAWGSPYVPEVRSNGRSRIRHRSARNAPGFLKMYKKMHRINRKDLMNSEVICSVKSRILQYESEQQHKDLLRAWSQCSTEEVPRDMVPTRISEFEKLIQKSKSMPNLGDDMLSPVTLEPPQNGLCPKRRFSIEYLLEEENQSGPPARGRRGCQSNALVPIHIEVTSDEQPRAHVEFSDSDQDGVVSDHSDYIHLEGSSFCSESDFDHFSFTSSESFYGSSHHHHHHHHHHHRHLISSCKGRCPASYTRFTTMLKHERARHENTEEPRRQEMDPGLSKLAFLVSPVPFRRKKNSAPKKQTEKAKCKASVFEALDSALKDICDQIKAEKKRGSLPDNSILHRLISELLPDVPERNSSLRALRRSPLHQPLHPLPPDGAIHCPPYQNDCGRMPRSASFQDVDTANSSCHHQDRGGALQDRESPRSYSSTLTDMGRSAPRERRGTPEKEKLPAKAVYDFKAQTSKELSFKKGDTVYILRKIDQNWYEGEHHGRVGIFPISYVEKLTPPEKAQPARPPPPAQPGEIGEAIAKYNFNADTNVELSLRKGDRVILLKRVDQNWYEGKIPGTNRQGIFPVSYVEVVKKNTKGAEDYPDPPIPHSYSSDRIHSLSSNKPQRPVFTHENIQGGGEPFQALYNYTPRNEDELELRESDVIDVMEKCDDGWFVGTSRRTKFFGTFPGNYVKRL

SEQ ID NO: 36280 - protein, 671 aa, Homo sapiens
  REGION 1..671: note = ENSP00000240123
MQGPPRSLRAGLSLDDFIPGHLQSHIGSSSRGTRVPVIRNGGSNTLNFQFHDPAPRTVCNGGYTPRRDASQHPDPAWYQTWPGPGSKPSASTKIPASQHTQNWSATWTKDSKRRDKRWVKYEGIGPVDESGMPIAPRSSVDRPRDWYRRMFQQIHRKMPDLQLDWTFEEPPRDPRHLGAQQRPAHRPGPATSSSGRSWDHSEELPRSTFNYRPGAFSTVLQPSNQVLRRREKVDNVWTEESWNQFLQELETGQRPKKPLVDDPGEKPSQPIEVLLERELAELSAELDKDLRAIETRLPSPKSSPAPRRAPEQRPPAGPASAWSSSYPHAPYLGSARSLSPHKMADGGSPFLGRRDFVYPSSTRDPSASNGGGSPARREEKKRKAARLKFDFQAQSPKELTLQKGDIVYIHKEVDKNWLEGEHHGRLGIFPANYVEVLPADEIPKPIKPPTYQVLEYGEAVAQYTFKGDLEVELSFRKGEHICLIRKVNENWYEGRITGTGRQGIFPASYVQVSREPRLRLCDDGPQLPTSPRLTAAARSARHPSSPSALRSPADPIDLGGQTSPRRTGFSFPTQEPRPQTQNLGTPGPALSHSRGPSHPLDLGTSSPNTSQIHWTPYRAMYQYRPQNEDELELREGDRVDVMQQCDDGWFVGVSRRTQKFGTFPGNYVAPV

SEQ ID NO: 36281 - protein, 328 aa, Homo sapiens
  REGION 1..328: note = ENSP00000429723
MQGPPRSLRAGLSLDDFIPGHLQSHIGSSSRGTRVPVIRNGGSNTLNFQFHDPAPRTVCNGGYTPRRDASQHPDPAWYQTWPGPGSKPSASTKIPASQHTQNWSATWTKDSKRRDKRWVKYEGIGPVDESGMPIAPRSSVDRPRDWYRRMFQQIHRKMPDLQLDWTFEEPPRDPRHLGAQQRPAHRPGPATSSSGRSWDHSEELPRSTFNYRPGAFSTVLQPSNQVLRRREKVDNVWTEESWNQFLQELETGQRPKKPLVDDPGEKPSQPIEVLLERELAELSAELDKDLRAIETRLPSPKPGLSLELQLPTCTLPGFRPVPESPQNG

SEQ ID NO: 36282 - protein, 152 aa, Homo sapiens
  REGION 1..152: note = ENSP00000428102
  VARIANT 1: note = Any amino acid
XNFQFHDPAPRTVCNGGYTPRRDASQHPDPAWYQTWPGPGSKPSASTKIPASQHTQNWSATWTKDSKRRDKRWVKYEGIGPVDESGMPIAPRSSVDRPRDWYRRMFQQIHRKMPEEAGTTLKSYLEAPSTTDLEHSPLCCSPQIRCSDAGKK

SEQ ID NO: 36283 - protein, 174 aa, Homo sapiens
  REGION 1..174: note = ENSP00000431128
MADGGSPFLGRRDFVYPSSTRDPSASNGGGSPARREEKKRKAARLKFDFQAQSPKELTLQKGDIVYIHKEVDKNWLEGEHHGRLGIFPANYVEVLPADEIPKPIKPPTYQVLEYGEAVAQYTFKGDLEVELSFRKGEHICLIRKVNENWYEGRITGTGRQGIFPASYVQVSREP

SEQ ID NO: 36284 - protein, 329 aa, Homo sapiens
  REGION 1..329: note = ENSP00000429764
MADGGSPFLGRRDFVYPSSTRDPSASNGGGSPARREEKKRKAARLKFDFQAQSPKELTLQKGDIVYIHKEVDKNWLEGEHHGRLGIFPANYVEVLPADEIPKPIKPPTYQVLEYGEAVAQYTFKGDLEVELSFRKGEHICLIRKVNENWYEGRITGTGRQGIFPASYVQVSREPRLRLCDDGPQLPTSPRLTAAARSARHPSSPSALRSPADPIDLGGQTSPRRTGFSFPTQEPRPQTQNLGTPGPALSHSRGPSHPLDLGTSSPNTSQIHWTPYRAMYQYRPQNEDELELREGDRVDVMQQCDDGWFVGVSRRTQKFGTFPGNYVAPV

SEQ ID NO: 36285 - protein, 94 aa, Homo sapiens
  REGION 1..94: note = ENSP00000429479
MADGGSPFLGRRDFVYPSSTRDPSASNGGGSPARREEKKRKAARLKFDFQAQSPKELTLQKGDIVYIHKEVDKNWLEGEHHGRLGIFPANYVEV

SEQ ID NO: 36286 - protein, 226 aa, Homo sapiens
  REGION 1..226: note = ENSP00000428678
AVLVPTCRELTLQKGDIVYIHKEVDKNWLEGEHHGRLGIFPANYVEVLPADEIPKPIKPPTYQVLEYGEAVAQYTFKGDLEVELSFRKGEHICLIRKVNENWYEGRITGTGRQGIFPASYVQVSREPRLRLCDDGPQLPTSPRLTAAARSARHPSSPSALRSPADPIDLGGQTSPRRTGFSFPTQEPRPQTQNLGTPGPALSHSRGPSHPLDLGTSSPNTSQIHWT

SEQ ID NO: 36287 - protein, 186 aa, Homo sapiens
  REGION 1..186: note = ENSP00000428327
  VARIANT 1: note = Any amino acid
XNWYEGRITGTGRQGIFPASYVQVSREPRLRLCDDGPQLPTSPRLTAAARSARHPSSPSALRSPADPIDLGGQTSPRRTGFSFPTQEPRPQTQNLGTPGPALSHSRGPSHPLDLGTSSPNTSQIHWTPYRAMYQYRPQNEDELELREGDRVDVMQQCDDGWFVGVSRRTQKFGTFPGNYVAPVGLL

SEQ ID NO: 36288 - protein, 1222 aa, Homo sapiens
  REGION 1..1222: note = ENSP00000358715
MEAARTERPAGRPGAPLVRTGLLLLSTWVLAGAEITWDATGGPGRPAAPASRPPALSPLSPRAVASQWPEELASARRAAVLGRRAGPELLPQQGGGRGGEMQVEAGGTSPAGERRGRGIPAPAKLGGARRSRRAQPPITQERGDAWATAPADGSRGSRPLAKGSREEVKAPRAGGSAAEDLRLPSTSFALTGDSAHNQAMVHWSGHNSSVILILTKLYDFNLGSVTESSLWRSTDYGTTYEKLNDKVGLKTVLSYLYVNPTNKRKIMLLSDPEMESSILISSDEGATYQKYRLTFYIQSLLFHPKQEDWVLAYSLDQKLYSSMDFGRRWQLMHERITPNRFYWSVAGLDKEADLVHMEVRTTDGYAHYLTCRIQECAETTRSGPFARSIDISSLVVQDEYIFIQVTTSGRASYYVSYRREAFAQIKLPKYSLPKDMHIISTDENQVFAAVQEWNQNDTYNLYISDTRGIYFTLAMENIKSSRGLMGNIIIELYEVAGIKGIFLANKKVDDQVKTYITYNKGRDWRLLQAPDVDLRGSPVHCLLPFCSLHLHLQLSENPYSSGRISSKETAPGLVVATGNIGPELSYTDIGVFISSDGGNTWRQIFDEEYNVWFLDWGGALVAMKHTPLPVRHLWVSFDEGHSWDKYGFTSVPLFVDGALVEAGMETHIMTVFGHFSLRSEWQLVKVDYKSIFSRHCTKEDYQTWHLLNQGEPCVMGERKIFKKRKPGAQCALGRDHSGSVVSEPCVCANWDFECDYGYERHGESQCVPAFWYNPASPSKDCSLGQSYLNSTGYRRIVSNNCTDGLREKYTAKAQMCPGKAPRGLHVVTTDGRLVAEQGHNATFIILMEEGDLQRTNIQLDFGDGIAVSYANFSPIEDGIKHVYKSAGIFQVTAYAENNLGSDTAVLFLHVVCPVEHVHLRVPFVAIRNKEVNISAVVWPSQLGTLTYFWWFGNSTKPLITLDSSISFTFLAEGTDTITVQVAAGNALIQDTKEIAVHEYFQSQLLSFSPNLDYHNPDIPEWRKDIGNVIKRALVKVTSVPEDQILIAVFPGLPTSAELFILPPKNLTERRKGNEGDLEQIVETLFNALNQNLVQFELKPGVQVIVYVTQLTLAPLVDSSAGHSSSAMLMLLSVVFVGLAVFLIYKFKRKIPWINIYAQVQHDKEQEMIGSVSQSENAPKITLSDFTEPEELLDKELDTRVIGGIATIANSESTKEIPNCTSV

SEQ ID NO: 36289 - protein, 152 aa, Homo sapiens
  REGION 1..152: note = ENSP00000376876
ENPYSSGRISSKETAPGLVVATGNIGPELSYTDIGVFISSDGGNTWRQIFDEEYNVWFLDWGGALVAMKHTPLPVRHLWVSFDEGHSWDKYGFTSVPLFVDGALVEAGMETHIMTDYGYERHGESQCVPAFWYNPASPSKDCSLGQSYLNST

SEQ ID NO: 36290 - protein, 1222 aa, Homo sapiens; identical to SEQ ID NO: 36288
  REGION 1..1222: note = ENSP00000358713

SEQ ID NO: 36291 - protein, 1333 aa, Homo sapiens [sequence omitted]

SEQ ID NO: 36292 - protein, 1318 aa, Homo sapiens
  REGION 1..1318: note = ENSP00000378479
MQAQQLPYEFFSEENAPKWRGLLVPALKKVQGQVHPTLESNDDALQYVEELILQLLNMLCQAQPRSASDVEERVQKSFPHPIDKWAIADAQSAIEKRKRRNPLSLPVEKIHPLLKEVLGYKIDHQVSVYIVAVLEYISADILKLVGNYVRNIRHYEITKQDIKVAMCADKVLMDMFHQDVEDINILSLTDEEPSTSGEQTYYDLVKAFMAEIRQYIRELNLIIKVFREPFVSNSKLFSANDVENIFSRIVDIHELSVKLLGHIEDTVEMTDEGSPHPLVGSCFEDLAEELAFDPYESYARDILRPGFHDRFLSQLSKPGAALYLQSIGEGFKEAVQYVLPRLLLAPVYHCLHYFELLKQLEEKSEDQEDKECLKQAITALLNVQSGMEKICSKSLAKRRLSESACRFYSQQMKGKQLAIKKMNEIQKNIDGWEGKDIGQCCNEFIMEGTLTRVGAKHERHIFLFDGLMICCKSNHGQPRLPGASNAEYRLKEKFFMRKVQINDKDDTNEYKHAFEIILKDENSVIFSAKSAEEKNNWMAALISLQYRSTLERMLDVTMLQEEKEEQMRLPSADVYRFAEPDSEENIIFEENMQPKAGIPIIKAGTVIKLIERLTYHMYADPNFVRTFLTTYRSFCKPQELLSLIIERFEIPEPEPTEADRIAIENGDQPLSAELKRFRKEYIQPVQLRVLNVCRHWVEHHFYDFERDAYLLQRMEEFIGTVRGKAMKKWVESITKIIQRKKIARDNGPGHNITFQSSPPTVEWHISRPGHIETFDLLTLHPIEIARQLTLLESDLYRAVQPSELVGSVWTKEDKEINSPNLLKMIRHTTNLTLWFEKCIVETENLEERVAVVSRIIEILQVFQELNNFNGVLEVVSAMNSSPVYRLDHTFEQIPSRQKKILEEAHELSEDHYKKYLAKLRSINPPCVPFFGIYLTNILKTEEGNPEVLKRHGKELINFSKRRKVAEITGEIQQYQNQPYCLRVESDIKRFFENLNPMGNSMEKEFTDYLFNKSLEIEPRNPKPLPRFPKKYSYPLKSPGVRPSNPRPGTMRHPTPLQQEPRKISYSRIPESETESTASAPNSPRTPLTPPPASGASSTTDVCSVFDSDHSSPFHSRSASVSSISLTKGTDEVPVPPPVPPRRRPESAPAESSPSKIMSKHLDSPPAIPPRQPTSKAYSPRYSISDRTSISDPPESPPLLPPREPVRTPDVFSSSPLHLQPPPLGKKSDHGNAFFPNSPSPFTPPPPQTPSPHGTRRHLPSPPLTQEVDLHSIAGPPVPPRQSTSQHIPKLPPKTYKREHTHPSMHRDGPPLLENAHSS

SEQ ID NO: 36293 - protein, 102 aa, Homo sapiens
  REGION 1..102: note = ENSP00000393899
MLCQAQPRSASDVEERVQKSFPHPIDKWAIADAQSAIEKRKRRNPLSLPVEKIHPLLKEVLGYKIDHQVSVYIVAVLEYISADILKLVGNYVRNIRHYEITK

SEQ ID NO: 36294 - protein, 1333 aa, Homo sapiens [sequence omitted]

SEQ ID NO: 36295 - protein, 213 aa, Homo sapiens
  REGION 1..213: note = ENSP00000414853
MAEEQDLSEVELSPVGSEEPRCLSPGSAPSLGPDGGGGGSGLRASPGPGELGKVKKEQQDGEADDDKFPVCIREAVSQVLSGYDWTLVPMPVRVNGASKSKPHVKRPMNAFMVWAQAARRKLADQYPHLHNAELSKTLGKLWRLLNESDKRPFIEEAERLRMQHKKDHPDYKYQPRRRKNGKAAQGEAECPGGEAEQGGTAAIQAHYKSAHLD

SEQ ID NO: 36296 - protein, 466 aa, Homo sapiens
  REGION 1..466: note = ENSP00000354130
MAEEQDLSEVELSPVGSEEPRCLSPGSAPSLGPDGGGGGSGLRASPGPGELGKVKKEQQDGEADDDKFPVCIREAVSQVLSGYDWTLVPMPVRVNGASKSKPHVKRPMNAFMVWAQAARRKLADQYPHLHNAELSKTLGKLWRLLNESDKRPFIEEAERLRMQHKKDHPDYKYQPRRRKNGKAAQGEAECPGGEAEQGGTAAIQAHYKSAHLDHRHPGEGSPMSDGNPEHPSGQSHGPPTPPTTPKTELQSGKADPKRDGRSMGEGGKPHIDFGNVDIGEISHEVMSNMETFDVAELDQYLPPNGHPGHVSSYSAAGYGLGSALAVASGHSAWISKPPGVALPTVSPPGVDAKAQVKTETAGPQGPPHYTDQPSTSQIAYTSLSLPHYGSAFPSISRPQFDYSDHQPSGPYYGHSGQASGLYSAFSYMGPSQRPLYTAISDPSPSGPQSHSPTHWEQPVYTTLSRP

SEQ ID NO: 36297 - protein, 179 aa, Homo sapiens
  REGION 1..179: note = ENSP00000399777
  VARIANT 1: note = Any amino acid
XQYPHLHNAELSKTLGKLWRLLNESDKRPFIEEAERLRMQHKKDHPDYKYQPRRRKNGKAAQGEAECPGGEAEQGGTAAIQAHYKSAHLDHRHPGEGSPMSDGNPEHPSGQSHGPPTPPTTPKTELQSGKADPKRDGRSMGEGGKPHIDFGNVDIGEISHEMGKLKFARLMLRSAGARI

SEQ ID NO: 36298 - protein, 466 aa, Homo sapiens; identical to SEQ ID NO: 36296
  REGION 1..466: note = ENSP00000380093

SEQ ID NO: 36299 - protein, 622 aa, Homo sapiens
  REGION 1..622: note = ENSP00000356172
MSMRSPISAQLALDGVGTMVNCTIKSEEKKEPCHEAPQGSATAAEPQPGDPARASQDSADPQAPAQGNFRGSWDCSSPEGNGSPEPKRPGVSEAASGSQEKLDFNRNLKEVVPAIEKLLSSDWKERFLGRNSMEAKDVKGTQESLAEKELQLLVMIHQLSTLRDQLLTAHSEQKNMAAMLFEKQQQQMELARQQQEQIAKQQQQLIQQQHKINLLQQQIQQVNMPYVMIPAFPPSHQPLPVTPDSQLALPIQPIPCKPVEYPLQLLHSPPAPVVKRPGAMATHHPLQEPSQPLNLTAKPKAPELPNTSSSPSLKMSSCVPRPPSHGGPTRDLQSSPPSLPLGFLGEGDAVTKAIQDARQLLHSHSGALDGSPNTPFRKDLISLDSSPAKERLEDGCVHPLEEAMLSCDMDGSRHFPESRNSSHIKRPMNAFMVWAKDERRKILQAFPDMHNSSISKILGSRWKSMTNQEKQPYYEEQARLSRQHLEKYPDYKYKPRPKRTCIVEGKRLRVGEYKALMRTRRQDARQSYVIPPQAGQVQMSSSDVLYPRAAGMPLAQPLVEHYVPRSLDPNMPVIVNTCSLREEGEGTDDRHSVADGEMYRYSEDEDSEGEEKSDGELVVLTD

SEQ ID NO: 36300 - protein, 57 aa, Homo sapiens
  REGION 1..57: note = ENSP00000433595
MSMRSPISAQLALDGVGTMVNCTIKSEEKKEPCHEAPQGSATAAEPQPGDPARASQD

SEQ ID NO: 36301 - protein, 179 aa, Homo sapiens
  REGION 1..179: note = ENSP00000436297
MSMRSPISAQLALDGVGTMVNCTIKSEEKKEPCHEAPQGSATAAEPQPGDPARASQDSADPQAPAQGNFRGSWDCSSPEGNGSPEPKRPGVSEAASGSQEKLDFNRNLKEVVPAIEKLLSSDWKERFLGRNSMEAKDVKGTQESLAEKELQLLVMIHQLSTLRDQLLTAHSEQKNMAAM

SEQ ID NO: 36302 - protein, 128 aa, Homo sapiens
  REGION 1..128: note = ENSP00000434093
  VARIANT 1: note = Any amino acid
XTQESLAEKELQLLVMIHQLSTLRDQLLTAHSEQKNMAAMLFEKQQQQMELARQQQEQIAKQQQQLIQQQHKINLLQQQIQQVNMPYVMIPAFPPSHQPLPVTPDSQLALPIQPIPCKPGLFSLLPFP

SEQ ID NO: 36303 - protein, 622 aa, Homo sapiens; identical to SEQ ID NO: 36299
  REGION 1..622: note = ENSP00000478239

SEQ ID NO: 36304 - protein, 317 aa, Homo sapiens
  REGION 1..317: note = ENSP00000323588
MYNMMETELKPPGPQQTSGGGGGNSTAAAAGGNQKNSPDRVKRPMNAFMVWSRGQRRKMAQENPKMHNSEISKRLGAEWKLLSETEKRPFIDEAKRLRALHMKEHPDYKYRPRRKTKTLMKKDKYTLPGGLLAPGGNSMASGVGVGAGLGAGVNQRMDSYAHMNGWSNGSYSMMQDQLGYPQHPGLNAHGAAQMQPMHRYDVSALQYNSMTSSQTYMNGSPTYSMSYSQQGTPGMALGSMGSVVKSEASSSPPVVTSSSHSRAPCQAGDLRDMISMYLPGAEVPEPAAPSRLHMSQHYQSGPVPGTAINGTLPLSHM

SEQ ID NO: 36305 - protein, 808 aa, Homo sapiens
  REGION 1..808: note = ENSP00000324948
MSSKQATSPFACAADGEDAMTQDLTSREKEEGSDQHVASHLPLHPIMHNKPHSEELPTLVSTIQQDADWDSVLSSQQRMESENNKLCSLYSFRNTSTSPHKPDEGSRDREIMTSVTFGTPERRKGSLADVVDTLKQKKLEEMTRTEQEDSSCMEKLLSKDWKEKMERLNTSELLGEIKGTPESLAEKERQLSTMITQLISLREQLLAAHDEQKKLAASQIEKQRQQMDLARQQQEQIARQQQQLLQQQHKINLLQQQIQVQGHMPPLMIPIFPHDQRTLAAAAAAQQGFLFPPGITYKPGDNYPVQFIPSTMAAAAASGLSPLQLQKGHVSHPQINQRLKGLSDRFGRNLDTFEHGGGHSYNHKQIEQLYAAQLASMQVSPGAKMPSTPQPPNTAGTVSPTGIKNEKRGTSPVTQVKDEAAAQPLNLSSRPKTAEPVKSPTSPTQNLFPASKTSPVNLPNKSSIPSPIGGSLGRGSSLDILSSLNSPALFGDQDTVMKAIQEARKMREQIQREQQQQQPHGVDGKLSSINNMGLNSCRNEKERTRFENLGPQLTGKSNEDGKLGPGVIDLTRPEDAEGGATVAEARVYRDARGRASSEPHIKRPMNAFMVWAKDERRKILQAFPDMHNSNISKILGSRWKSMSNQEKQPYYEEQARLSKIHLEKYPNYKYKPRPKRTCIVDGKKLRIGEYKQLMRSRRQEMRQFFTVGQQPQIPITTGTGVVYPGAITMATTTPSPQMTSDCSSTSASPEPSLPVIQSTYGMKTDGGSLAGNEMINGEDEMEMYDDYEDDPKSDYSSENEAPEAVSAN

SEQ ID NO: 36306 - protein, 801 aa, Homo sapiens
  REGION 1..801: note = ENSP00000432134
MSSKQATSPFACAADGEDAMTQDLTSREKEEGSDQHVASHLPLHPIMHNKPHSEELPTLVSTIQQDADWDSVLSSQQRMESENNKLCSLYSFRNTSTSPHKPDEGSRDREIMTSVTFGTPERRKGSLADVVDTLKQKKLEEMTRTEQEDSSCMEKLLSKDWKEKMERLNTSELLGEIKGTPESLAEKERQLSTMITQLISLREQLLAAHDEQKKLAASQIEKQRQQMDLARQQQEQIARQQQQLLQQQHKINLLQQQIQVQGHMPPLMIPIFPHDQRTLAAAAAAQQGFLFPPGITYKPGDNYPVQFIPSTMAAAAASGLSPLQLQQLYAAQLASMQVSPGAKMPSTPQPPNTAGTVSPTGIKNEKRGTSPVTQVKDEAAAQPLNLSSRPKTAEPVKSPTSPTQNLFPASKTSPVNLPNKSSIPSPIGGSLGRGSSLGKWKSQHQEETYELDILSSLNSPALFGDQDTVMKAIQEARKMREQIQREQQQQQPHGVDGKLSSINNMGLNSCRNEKERTRFENLGPQLTGKSNEDGKLGPGVIDLTRPEDAEGSKAMNGSAAKLQQYYCWPTGGATVAEARVYRDARGRASSEPHIKRPMNAFMVWAKDERRKILQAFPDMHNSNISKILGSRWKSMSNQEKQPYYEEQARLSKIHLEKYPNYKYKPRPKRTCIVDGKKLRIGEYKQLMRSRRQEMRQFFTVGQQPQIPITTGTGVVYPGAITMATTTPSPQMTSDCSSTSASPEPSLPVIQSTYGMKTDGGSLAGNEMINGEDEMEMYDDYEDDPKSDYSSENEAPEAVSAN

SEQ ID NO: 36307 - protein, 804 aa, Homo sapiens
  REGION 1..804: note = ENSP00000434455
MGRMSSKQATSPFACAADGEDAMTQDLTSREKEEGSDQHVASHLPLHPIMHNKPHSEELPTLVSTIQQDADWDSVLSSQQRMESENNKLCSLYSFRNTSTSPHKPDEGSRDREIMTSVTFGTPERRKGSLADVVDTLKQKKLEEMTRTEQEDSSCMEKLLSKDWKEKMERLNTSELLGEIKGTPESLAEKERQLSTMITQLISLREQLLAAHDEQKKLAASQIEKQRQQMDLARQQQEQIARQQQQLLQQQHKINLLQQQIQVQGHMPPLMIPIFPHDQRTLAAAAAAQQGFLFPPGITYKPGDNYPVQFIPSTMAAAAASGLSPLQLQQLYAAQLASMQVSPGAKMPSTPQPPNTAGTVSPTGIKNEKRGTSPVTQVKDEAAAQPLNLSSRPKTAEPVKSPTSPTQNLFPASKTSPVNLPNKSSIPSPIGGSLGRGSSLGKWKSQHQEETYELDILSSLNSPALFGDQDTVMKAIQEARKMREQIQREQQQQQPHGVDGKLSSINNMGLNSCRNEKERTRFENLGPQLTGKSNEDGKLGPGVIDLTRPEDAEGSKAMNGSAAKLQQYYCWPTGGATVAEARVYRDARGRASSEPHIKRPMNAFMVWAKDERRKILQAFPDMHNSNISKILGSRWKSMSNQEKQPYYEEQARLSKIHLEKYPNYKYKPRPKRTCIVDGKKLRIGEYKQLMRSRRQEMRQFFTVGQQPQIPITTGTGVVYPGAITMATTTPSPQMTSDCSSTSASPEPSLPVIQSTYGMKTDGGSLAGNEMINGEDEMEMYDDYEDDPKSDYSSENEAPEAVSAN

SEQ ID NO: 36308 - protein, 828 aa, Homo sapiens
  REGION 1..828: note = ENSP00000433233
MSSKQATSPFACAADGEDAMTQDLTSREKEEGSDQHVASHLPLHPIMHNKPHSEELPTLVSTIQQDADWDSVLSSQQRMESENNKLCSLYSFRNTSTSPHKPDEGSRDREIMTSVTFGTPERRKGSLADVVDTLKQKKLEEMTRTEQEDSSCMEKLLSKDWKEKMERLNTSELLGEIKGTPESLAEKERQLSTMITQLISLREQLLAAHDEQKKLAASQIEKQRQQMDLARQQQEQIARQQQQLLQQQHKINLLQQQIQVQGHMPPLMIPIFPHDQRTLAAAAAAQQGFLFPPGITYKPGDNYPVQFIPSTMAAAAASGLSPLQLQKGHVSHPQINQRLKGLSDRFGRNLDTFEHGGGHSYNHKQIEQLYAAQLASMQVSPGAKMPSTPQPPNTAGTVSPTGIKNEKRGTSPVTQVKDEAAAQPLNLSSRPKTAEPVKSPTSPTQNLFPASKTSPVNLPNKSSIPSPIGGSLGRGSSLDILSSLNSPALFGDQDTVMKAIQEARKMREQIQREQQQQQPHGVDGKLSSINNMGLNSCRNEKERTRFENLGPQLTGKSNEDGKLGPGVIDLTRPEDAEGSKAMNGSAAKLQQYYCWPTGGATVAEARVYRDARGRASSEPHIKRPMNAFMVWAKDERRKILQAFPDMHNSNISKILGSRWKSMSNQEKQPYYEEQARLSKIHLEKYPNYKYKPRPKRTCIVDGKKLRIGEYKQLMRSRRQEMRQFFTVGQQPQIPITTGTGVVYPGAITMATTTPSPQMTSDCSSTSASPEPSLPVIQSTYGMKTDGGSLAGNEMINGEDEMEMYDDYEDDPKSDYSSENEAPEAVSAN

SEQ ID NO: 36309 - protein, 159 aa, Homo sapiens
  REGION 1..159: note = ENSP00000436170
MSSKQATSPFACAADGEDAMTQDLTSREKEEGSDQHVASHLPLHPIMHNKPHSEELPTLVSTIQQDADWDSVLSSQQRMESENNKLCSLYSFRNTSTSPHKPDEGSRDREIMTSVTFGTPERRKGSLADVVDTLKQKKLEEMTRTEQEDSSCMEKLLSK

SEQ ID NO: 36310 - protein, 159 aa, Homo sapiens
  REGION 1..159: note = ENSP00000432577
MSSKQATSPFACAADGEDAMTQDLTSREKEEGSDQHVASHLPLHPIMHNKPHSEELPTLVSTIQQDADWDSVLSSQQRMESENNKLCSLYSFRNTSTSPHKPDEGSRDREIMTSVTFGTPERRKGSLADVVDTLKQKKLEEMTRTEQEASLSFKISGVP

SEQ ID NO: 36311 - protein, 139 aa, Homo sapiens
  REGION 1..139: note = ENSP00000434892
MSSKQATSPFACAADGEDAMTQDLTSREKEEGSDQHVASHLPLHPIMHNKPHSEELPTLVSTIQQDADWDSVLSSQQRMESENNKLCSLYSFRNTSTSPHKPDEGSRDREIMTSVTFGTPERRKGSLADVVDTLKQKKL

SEQ ID NO: 36312 - protein, 79 aa, Homo sapiens
  REGION 1..79: note = ENSP00000432596
MSSKQATSPFACAADGEDAMTQDLTSREKEEGSDQHVASHLPLHPIMHNKPHSEELPTLVSTIQQDADWDSVLSSQQRM

SEQ ID NO: 36313 - protein, 808 aa, Homo sapiens; identical to SEQ ID NO: 36305
  REGION 1..808: note = ENSP00000379644

SEQ ID NO: 36314 - protein, 446 aa, Homo sapiens [sequence omitted]

SEQ ID NO: 36315 - protein, 509 aa, Homo sapiens
  REGION 1..509: note = ENSP00000245479
MNLLDPFMKMTDEQEKGLSGAPSPTMSEDSAGSPCPSGSGSDTENTRPQENTFPKGEPDLKKESEEDKFPVCIREAVSQVLKGYDWTLVPMPVRVNGSSKNKPHVKRPMNAFMVWAQAARRKLADQYPHLHNAELSKTLGKLWRLLNESEKRPFVEEAERLRVQHKKDHPDYKYQPRRRKSVKNGQAEAEEATEQTHISPNAIFKALQADSPHSSSGMSEVHSPGEHSGQSQGPPTPPTTPKTDVQPGKADLKREGRPLPEGGRQPPIDFRDVDIGELSSDVISNIETFDVNEFDQYLPPNGHPGVPATHGQVTYTGSYGISSTAATPASAGHVWMSKQQAPPPPPQQPPQAPPAPQAPPQPQAAPPQQPAAPPQQPQAHTLTTLSSEPGQSQRTHIKTEQLSPSHYSEQQQHSPQQIAYSPFNLPHYSPSYPPITRSQYDYTDHQNSSSYYSHAAGQGTGLYSTFTYMNPAQRPMYTPIADTSGVPSIPQTHSPQHWEQPVYTQLTRP

SEQ ID NO: 36316 - protein, 398 aa, Homo sapiens
  REGION 1..398: note = ENSP00000364430
MAAVAVLRNDSLQAFLQDRTPSASPDLGKHSPLALLAATCSRIGQPGAAAPPDFLQVPYDPALGSPSRLFHPWTADMPAHSPGALPPPHPSLGLTPQKTHLQPSFGAAHELPLTPPADPSYPYEFSPVKMLPSSMAALPASCAPAYVPYAAQAALPPGYSNLLPPPPPPPPPPTCRQLSPNPAPDDLPWWSIPQAGAGPGASGVPGSGLSGACAGAPHAPRFPASAAAAAAAAAALQRGLVLGPSDFAQYQSQIAALLQTKAPLAATARRCRRCRCPNCQAAGGAPEAEPGKKKQHVCHVPGCGKVYGKTSHLKAHLRWHTGERPFVCNWLFCGKSFTRSDELQRHLRTHTGEKRFACPECGKRFMRSDHLAKHVKTHQNKKLKVAEAGVKREDARDL

SEQ ID NO: 36317 - protein, 1193 aa, Homo sapiens
  REGION 1..1193: note = ENSP00000323300
MWRVKKLSLSLSPSPQTGKPSMRTPLRELTLQPGALTNSGKRSPACSSLTPSLCKLGLQEGSNNSSPVDFVNNKRTDLSSEHFSHSSKWLETCQHESDEQPLDPIPQISSTPKTSEEAVDPLGNYMVKTIVLVPSPLGQQQDMIFEARLDTMAETNSISLNGPLRTDDLVREEVAPCMGDRFSEVAAVSEKPIFQESPSHLLEESPPNPCSEQLHCSKESLSSRTEAVREDLVPSESNAFLPSSVLWLSPSTALAADFRVNHVDPEEEIVEHGAMEEREMRFPTHPKESETEDQALVSSVEDILSTCLTPNLVEMESQEAPGPAVEDVGRILGSDTESWMSPLAWLEKGVNTSVMLENLRQSLSLPSMLRDAAIGTTPFSTCSVGTWFTPSAPQEKSTNTSQTGLVGTKHSTSETEQLLCGRPPDLTALSRHDLEDNLLSSLVILEVLSRQLRDWKSQLAVPHPETQDSSTQTDTSHSGITNKLQHLKESHEMGQALQQARNVMQSWVLISKELISLLHLSLLHLEEDKTTVSQESRRAETLVCCCFDLLKKLRAKLQSLKAEREEARHREEMALRGKDAAEIVLEAFCAHASQRISQLEQDLASMREFRGLLKDAQTQLVGLHAKQEELVQQTVSLTSTLQQDWRSMQLDYTTWTALLSRSRQLTEKLTVKSQQALQERDVAIEEKQEVSRVLEQVSAQLEECKGQTEQLELENSRLATDLRAQLQILANMDSQLKELQSQHTHCAQDLAMKDELLCQLTQSNEEQAAQWQKEEMALKHMQAELQQQQAVLAKEVRDLKETLEFADQENQVAHLELGQVECQLKTTLEVLRERSLQCENLKDTVENLTAKLASTIADNQEQDLEKTRQYSQKLGLLTEQLQSLTLFLQTKLKEKTEQETLLLSTACPPTQEHPLPNDRTFLGSILTAVADEEPESTPVPLLGSDKSAFTRVASMVSLQPAETPGMEESLAEMSIMTTELQSLCSLLQESKEEAIRTLQRKICELQARLQAQEEQHQEVQKAKEADIEKLNQALCLRYKNEKELQEVIQQQNEKILEQIDKSGELISLREEVTHLTRSLRRAETETKVLQEALAGQLDSNCQPMATNWIQEKVWLSQEVDKLRVMFLEMKNEKEKLMIKFQSHRNILEENLRRSDKELEKLDDIVQHIYKTLLSIPEVVRGCKELQGLLEFLS

SEQ ID NO: 36318 - protein, 185 aa, Homo sapiens
  REGION 1..185: note = ENSP00000466061
  VARIANT 1: note = Any amino acid
XESKEEAIRTLQRKICELQARLQAQEEQHQEVQKAKEADIEKLNQALCLRYKNEKELQEVIQQQNEKILEQIDKSGELISLREEVTHLTRSLRRAETETKVLQEALAGQLDSNCQPMATNWIQEKVWLSQEVDKLRVMFLEMKNEKEKLMIKFQSHRNILEENLRRSDKELEKLDDIVQHIYKRW

SEQ ID NO: 36319 - protein, 186 aa, Homo sapiens
  REGION 1..186: note = ENSP00000466021
  VARIANT 1: note = Any amino acid
XLATDLRAQLQILANMDSQLKELQSQHTHCAQDLAMKDELLCQLTQSNEEQAAQWQKEEMALKHMQAELQQQQAVLAKEVRDLKETLEFADQENQVAHLELGQVECQLKTTLEVLRERSLQCENLKDTVENLTAKLASTIADNQEQDLEKTRQYSQKLGLLTEQLQSLTLFLQTKLKEKLFFLLCP

SEQ ID NO: 36320 - protein, 57 aa, Homo sapiens
  REGION 1..57: note = ENSP00000464280
QEQDLEKTRQYSQKLGLLTEQLQSLTLFLQTKLKEKTMFQESRNIAFFGLPAVCTKQ

SEQ ID NO: 36321 - protein, 129 aa, Homo sapiens
  REGION 1..129: note = ENSP00000464474
SRRAETLVCCCFDLLKKLRAKLQSLKAEREEARHREEMALRGKDAVGLHAKQEELVQQTVSLTSTLQQDWRSMQLDYTTWTALLSRSRQLTEKLTVKSQQALQERDVAIEEKQEISGLSCRFWPTWTAS

SEQ ID NO: 36322 - protein, 238 aa, Homo sapiens
  REGION 1..238: note = ENSP00000463095
  VARIANT 1: note = Any amino acid
XPHPETQDSSTQTDTSHSGITNKLQHLKESHEMGQALQQARNVMQSWVLISKELISLLHLSLLHLEEDKTTVSQESRRAETLVCCCFDLLKKLRAKLQSLKAEREEARHREEMALRGKDAVGLHAKQEELVQQTVSLTSTLQQDWRSMQLDYTTWTALLSRSRQLTEKLTVKSQQALQERDVAIEEKQEVSRVLEQVSAQLEECKGQTEQLELENSRLATDLRAQLQILANMDSQLKE

SEQ ID NO: 36323 - protein, 73 aa, Homo sapiens
  REGION 1..73: note = ENSP00000464400
MWRVKKLSLSLSPSPQTGKPSMRTPLRELTLQPGALTNSGKRSPACSSLTPSLCKLGLQQISVSIMWTQRRKL

SEQ ID NO: 36324 - protein, 72 aa, Homo sapiens
  REGION 1..72: note = ENSP00000462663
MWRVKKLSLSLSPSPQTGKPSMRTPLRELTLQPGALTNSGKRSPACSSLTPSLCKLGLQISVSIMWTQRRKL

SEQ ID NO: 36325 - protein, 272 aa, Homo sapiens
  REGION 1..272: note = ENSP00000444223
MWRVKKLSLSLSPSPQTGKPSMRTPLRELTLQPGALTNSGKRSPACSSLTPSLCKLGLQVRFAWTASRLGCLPREGSNNSSPVDFVNNKRTDLSSEHFSHSSKWLETCQHESDEQPLDPIPQISSTPKTSEEAVDPLGNYMVKTIVLVPSPLGQQQDMIFEARLDTMAETNSISLNGPLRTDDLVREEVAPCMGDRFSEVAAVSEKPIFQESPSHLLEESPPNPCSEQLHCSKESLSSRTEAVREDLVPSESNAFLPSSVLWLSPSTALAAD

SEQ ID NO: 36326 - protein, 1321 aa, Homo sapiens
  REGION 1..1321: note = ENSP00000262013
MELEDGVVYQEEPGGSGAVMSERVSGLAGSIYREFERLIGRYDEEVVKELMPLVVAVLENLDSVFAQDQEHQVELELLRDDNEQLITQYEREKALRKHAEEKFIEFEDSQEQEKKDLQTRVESLESQTRQLELKAKNYADQISRLEEREAELKKEYNALHQRHTEMIHNYMEHLERTKLHQLSGSDQLESTAHSRIRKERPISLGIFPLPAGDGLLTPDAQKGGETPGSEQWKFQELSQPRSHTSLKVSNSPEPQKAVEQEDELSDVSQGGSKATTPASTANSDVATIPTDTPLKEENEGFVKVTDAPNKSEISKHIEVQVAQETRNVSTGSAENEEKSEVQAIIESTPELDMDKDLSGYKGSSTPTKGIENKAFDRNTESLFEELSSAGSGLIGDVDEGADLLGMGREVENLILENTQLLETKNALNIVKNDLIAKVDELTCEKDVLQGELEAVKQAKLKLEEKNRELEEELRKARAEAEDARQKAKDDDDSDIPTAQRKRFTRVEMARVLMERNQYKERLMELQEAVRWTEMIRASRENPAMQEKKRSSIWQFFSRLFSSSSNTTKKPEPPVNLKYNAPTSHVTPSVKKRSSTLSQLPGDKSKAFDFLSEETEASLASRREQKREQYRQVKAHVQKEDGRVQAFGWSLPQKYKQVTNGQGENKMKNLPVPVYLRPLDEKDTSMKLWCAVGVNLSGGKTRDGGSVVGASVFYKDVAGLDTEGSKQRSASQSSLDKLDQELKEQQKELKNQEELSSLVWICTSTHSATKVLIIDAVQPGNILDSFTVCNSHVLCIASVPGARETDYPAGEDLSESGQVDKASLCGSMTSNSSAETDSLLGGITVVGCSAEGVTGAATSPSTNGASPVMDKPPEMEAENSEVDENVPTAEEATEATEGNAGSAEDTVDISQTGVYTEHVFTDPLGVQIPEDLSPVYQSSNDSDAYKDQISVLPNEQDLVREEAQKMSSLLPTMWLGAQNGCLYVHSSVAQWRKCLHSIKLKDSILSIVHVKGIVLVALADGTLAIFHRGVDGQWDLSNYHLLDLGRPHHSIRCMTVVHDKVWCGYRNKIYVVQPKAMKIEKSFDAHPRKESQVRQLAWVGDGVWVSIRLDSTLRLYHAHTYQHLQDVDIEPYVSKMLGTGKLGFSFVRITALMVSCNRLWVGTGNGVIISIPLTETNKTSGVPGNRPGSVIRVYGDENSDKVTPGTFIPYCSMAHAQLCFHGHRDAVKFFVAVPGQVISPQSSSSGTDLTGDKAGPSAQEPGSQTPLKSMLVISGGEGYIDFRMGDEGGESELLGEDLPLEPSVTKAERSHLIVWQVMYGNE

SEQ ID NO: 36327 - protein, 1177 aa, Homo sapiens
  REGION 1..1177: note = ENSP00000423165
MSPGCMLLFVFGFVGGAVVINSAILVSLSVLLLVHFSISTGVPALTQNLPRILRKERPISLGIFPLPAGDGLLTPDAQKGGETPGSEQWKFQELSQPRSHTSLKDELSDVSQGGSKATTPASTANSDVATIPTDTPLKEENEGFVKVTDAPNKSEISKHIEVQVAQETRNVSTGSAENEEKSEVQAIIESTPELDMDKDLSGYKGSSTPTKGIENKAFDRNTESLFEELSSAGSGLIGDVDEGADLLGMGREVENLILENTQLLETKNALNIVKNDLIAKVDELTCEKDVLQGELEAVKQAKLKLEEKNRELEEELRKARAEAEDARQKAKDDDDSDIPTAQRKRFTRVEMARVLMERNQYKERLMELQEAVRWTEMIRASRENPAMQEKKRSSIWQFFSRLFSSSSNTTKKPEPPVNLKYNAPTSHVTPSVKKRSSTLSQLPGDKSKAFDFLSEETEASLASRREQKREQYRQVKAHVQKEDGRVQAFGWSLPQKYKQVTNGQGENKMKNLPVPVYLRPLDEKDTSMKLWCAVGVNLSGGKTRDGGSVVGASVFYKDVAGLDTEGSKQRSASQSSLDKLDQELKEQQKELKNQEELSSLVWICTSTHSATKVLIIDAVQPGNILDSFTVCNSHVLCIASVPGARETDYPAGEDLSESGQVDKASLCGSMTSNSSAETDSLLGGITVVGCSAEGVTGAATSPSTNGASPVMDKPPEMEAENSEVDENVPTAEEATEATEGNAGSAEDTVDISQTGVYTEHVFTDPLGVQIPEDLSPVYQSSNDSDAYKDQISVLPNEQDLVREEAQKMSSLLPTMWLGAQNGCLYVHSSVAQWRKCLHSIKLKDSILSIVHVKGIVLVALADGTLAIFHRGVDGQWDLSNYHLLDLGRPHHSIRCMTVVHDKVWCGYRNKIYVVQPKAMKIEKSFDAHPRKESQVRQLAWVGDGVWVSIRLDSTLRLYHAHTYQHLQDVDIEPYVSKMLGTGKLGFSFVRITALMVSCNRLWVGTGNGVIISIPLTETVILHQGRLLGLRANKTSGVPGNRPGSVIRVYGDENSDKVTPGTFIPYCSMAHAQLCFHGHRDAVKFFVAVPGQVISPQSSSSGTDLTGDKAGPSAQEPGSQTPLKSMLVISGGEGYIDFRMGDEGGESELLGEDLPLEPSVTKAERSHLIVWQVMYGNE

SEQ ID NO: 36328 - protein, 1311 aa, Homo sapiens
  REGION 1..1311: note = ENSP00000426900
MELEDGVVYQEEPGGSGAVMSERVSGLAGSIYREFERLIGRYDEEVVKELMPLVVAVLENLDSVFAQDQEHQVELELLRDDNEQLITQYEREKALRKHAEEKFIEFEDSQEQEKKDLQTRVESLESQTRQLELKAKNYADQISRLEEREAELKKEYNALHQRHTEMIHNYMEHLERTKLHQLSGSDQLESTAHSRIRKERPISLGIFPLPAGDGLLTPDAQKGGETPGSEQWKFQELSQPRSHTSLKDELSDVSQGGSKATTPASTANSDVATIPTDTPLKEENEGFVKVTDAPNKSEISKHIEVQVAQETRNVSTGSAENEEKSEVQAIIESTPELDMDKDLSGYKGSSTPTKGIENKAFDRNTESLFEELSSAGSGLIGDVDEGADLLGMGREVENLILENTQLLETKNALNIVKNDLIAKVDELTCEKDVLQGELEAVKQAKLKLEEKNRELEEELRKARAEAEDARQKAKDDDDSDIPTAQRKRFTRVEMARVLMERNQYKERLMELQEAVRWTEMIRASRENPAMQEKKRSSIWQFVPTRFSRLFSSSSNTTKKPEPPVNLKYNAPTSHVTPSVKKRSSTLSQLPGDKSKAFDFLSEETEASLASRREQKREQYRQVKAHVQKEDGRVQAFGWSLPQKYKQVTNGQGENKMKNLPVPVYLRPLDEKDTSMKLWCAVGVNLSGGKTRDGGSVVGASVFYKDVAGLDTEGSKQRSASQSSLDKLDQELKEQQKELKNQEELSSLVWICTSTHSATKVLIIDAVQPGNILDSFTVCNSHVLCIASVPGARETDYPAGEDLSESGQVDKASLCGSMTSNSSAETDSLLGGITVVGCSAEGVTGAATSPSTNGASPVMDKPPEMEAENSEVDENVPTAEEATEATEGNAGSAEDTVDISQTGVYTEHVFTDPLGVQIPEDLSPVYQSSNDSDAYKDQISVLPNEQDLVREEAQKMSSLLPTMWLGAQNGCLYVHSSVAQWRKCLHSIKLKDSILSIVHVKGIVLVALADGTLAIFHRGVDGQWDLSNYHLLDLGRPHHSIRCMTVVHDKVWCGYRNKIYVVQPKAMKIEKSFDAHPRKESQVRQLAWVGDGVWVSIRLDSTLRLYHAHTYQHLQDVDIEPYVSKMLGTGKLGFSFVRITALMVSCNRLWVGTGNGVIISIPLTETNKTSGVPGNRPGSVIRVYGDENSDKVTPGTFIPYCSMAHAQLCFHGHRDAVKFFVAVPGQVISPQSSSSGTDLTGDKAGPSAQEPGSQTPLKSMLVISGGEGYIDFRMGDEGGESELLGEDLPLEPSVTKAERSHLIVWQVMYGNE

SEQ ID NO: 36329 - protein, 1307 aa, Homo sapiens
  REGION 1..1307: note = ENSP00000349636
MELEDGVVYQEEPGGSGAVMSERVSGLAGSIYREFERLIGRYDEEVVKELMPLVVAVLENLDSVFAQDQEHQVELELLRDDNEQLITQYEREKALRKHAEEKFIEFEDSQEQEKKDLQTRVESLESQTRQLELKAKNYADQISRLEEREAELKKEYNALHQRHTEMIHNYMEHLERTKLHQLSGSDQLESTAHSRIRKERPISLGIFPLPAGDGLLTPDAQKGGETPGSEQWKFQELSQPRSHTSLKDELSDVSQGGSKATTPASTANSDVATIPTDTPLKEENEGFVKVTDAPNKSEISKHIEVQVAQETRNVSTGSAENEEKSEVQAIIESTPELDMDKDLSGYKGSSTPTKGIENKAFDRNTESLFEELSSAGSGLIGDVDEGADLLGMGREVENLILENTQLLETKNALNIVKNDLIAKVDELTCEKDVLQGELEAVKQAKLKLEEKNRELEEELRKARAEAEDARQKAKDDDDSDIPTAQRKRFTRVEMARVLMERNQYKERLMELQEAVRWTEMIRASRENPAMQEKKRSSIWQFFSRLFSSSSNTTKKPEPPVNLKYNAPTSHVTPSVKKRSSTLSQLPGDKSKAFDFLSEETEASLASRREQKREQYRQVKAHVQKEDGRVQAFGWSLPQKYKQVTNGQGENKMKNLPVPVYLRPLDEKDTSMKLWCAVGVNLSGGKTRDGGSVVGASVFYKDVAGLDTEGSKQRSASQSSLDKLDQELKEQQKELKNQEELSSLVWICTSTHSATKVLIIDAVQPGNILDSFTVCNSHVLCIASVPGARETDYPAGEDLSESGQVDKASLCGSMTSNSSAETDSLLGGITVVGCSAEGVTGAATSPSTNGASPVMDKPPEMEAENSEVDENVPTAEEATEATEGNAGSAEDTVDISQTGVYTEHVFTDPLGVQIPEDLSPVYQSSNDSDAYKDQISVLPNEQDLVREEAQKMSSLLPTMWLGAQNGCLYVHSSVAQWRKCLHSIKLKDSILSIVHVKGIVLVALADGTLAIFHRGVDGQWDLSNYHLLDLGRPHHSIRCMTVVHDKVWCGYRNKIYVVQPKAMKIEKSFDAHPRKESQVRQLAWVGDGVWVSIRLDSTLRLYHAHTYQHLQDVDIEPYVSKMLGTGKLGFSFVRITALMVSCNRLWVGTGNGVIISIPLTETNKTSGVPGNRPGSVIRVYGDENSDKVTPGTFIPYCSMAHAQLCFHGHRDAVKFFVAVPGQVISPQSSSSGTDLTGDKAGPSAQEPGSQTPLKSMLVISGGEGYIDFRMGDEGGESELLGEDLPLEPSVTKAERSHLIVWQVMYGNE

SEQ ID NO: 36330 - protein, 152 aa, Homo sapiens
  REGION 1..152: note = ENSP00000423346
TSNSSAETDSLLGGITVVGCSAEGVTGAATSPSTNGASPVMDKPPEMEAENSEVDENVPTAEEATEATEGNAGSAEDTVDISQTGVYTEHVFTDPLGVQIPEDLSPVYQSSNDSDAYKDQISVLPNEQDLVREEAQKMSSLLPTMWLGAQNG

SEQ ID NO: 36331 - protein, 250 aa, Homo sapiens
  REGION 1..250: note = ENSP00000430205
  VARIANT 1: note = Any amino acid
XEQQKELKNQEELSSLVWICTSTHSATKVLIIDAVQPGNILDSFTVCNSHVLCIASVPGARETDYPAGEDLSESGQVDKASLCGSMTSNSSAETDSLLGGITVVGCSAEGVTGAATSPSTNGASPVMDKPPAEEATEATEGNAGSAEDTVDISQTGVYTEHVFTDPLGVQIPEDLSPVYQSSNDSDAYKDQISVLPNEQDLVREEAQKMSSLLPTMWLGAQNGCLYVHSSVAQWRKCLHSIKLKDSILSI

SEQ ID NO: 36332 - protein, 174 aa, Homo sapiens
  REGION 1..174: note = ENSP00000429343
GSAENEEKSEVQAIIESTPELDMDKDLSGYKGSSTPTKGIENKAFDRNTESLFEELSSAGSGLIGDVDEGADLLGEYSDHNFFGMGREVENLILENTQLLETKNALNIVKNDLIAKVDELTCEKDVLQGELEAVKQAKLKLEEKNRELEEELRKARAEAEDARQKAKDDDDSDI

SEQ ID NO: 36333 - protein, 156 aa, Homo sapiens
  REGION 1..156: note = ENSP00000426061
MSPGCMLLFVFGFVGGAVVINSAILVSLSVLLLVHFSISTGVPALTQNLPRILRKERPISLGIFPLPAGDGLLTPDAQKGGETPGSEQWKFQELSQPRSHTSLKVSNSPEPQKAVEQEDELSDVSQGGSKATTPASTANSDVATIPTDTPLKEENE

SEQ ID NO: 36334 - protein, 1312 aa, Homo sapiens [sequence omitted]

SEQ ID NO: 36335 - protein, 303 aa, Homo sapiens
  REGION 1..303: note = ENSP00000231061
MRAWIFFLLCLAGRALAAPQQEALPDETEVVEETVAEVTEVSVGANPVQVEVGEFDDGAEETEEEVVAENPCQNHHCKHGKVCELDENNTPMCVCQDPTSCPAPIGEFEKVCSNDNKTFDSSCHFFATKCTLEGTKKGHKLHLDYIGPCKYIPPCLDSELTEFPLRMRDWLKNVLVTLYERDEDNNLLTEKQKLRVKKIHENEKRLEAGDHPVELLARDFEKNYNMYIFPVHWQFGQLDQHPIDGYLSHTELAPLRAPLIPMEHCTTRFFETCDLDNDKYIALDEWAGCFGIKQKDIDKDLVI

SEQ ID NO: 36336 - protein, 149 aa, Homo sapiens
  REGION 1..149: note = ENSP00000440127
MCVCQDPTSCPAPIGEFEKVCSNDNKTFDSSCHFFATKCTLEGTKKGHKLHLDYIGPCKYIPPCLDSELTEFPLRMRDWLKNVLVTLYERDEDNNLLTEKQKLRVKKIHENEKRLEAGDHPVELLARDFEKNYNMYIFPVHWQFGQLDQ

SEQ ID NO: 36337 - protein, 115 aa, Homo sapiens
  REGION 1..115: note = ENSP00000428119
MCVCQDPTSCPAPIGEFEKVCSNDNKTFDSSCHFFATKCTLEGTKKGHKLHLDYIGPCKYIPPCLDSELTEFPLRMRDWLKNVLVTLYERDEDNNLLTEKQKLRVKKIHENEKRL

SEQ ID NO: 36338 - protein, 111 aa, Homo sapiens
  REGION 1..111: note = ENSP00000444998
MRAWIFFLLCLAGRALAAPQQEALPDETEVVEETVAEVTEVSVGANPVQVEVGEFDDGAEETEEEVVAENPCQNHHCKHGKVCELDENNTPMCVCQDPTSCPAPIGEFEKV

SEQ ID NO: 36339 - protein, 53 aa, Homo sapiens
  REGION 1..53: note = ENSP00000429152
MRAWIFFLLCLAGRALAAPQQEALPDETEVVEETVAEVTEVSVGANPVQVEVG

SEQ ID NO: 36340 - protein, 664 aa, Homo sapiens
  REGION 1..664: note = ENSP00000282470
MKTGLFFLCLLGTAAAIPTNARLLSDHSKPTAETVAPDNTAIPSLRAEAEENEKETAVSTEDDSHHKAEKSSVLKSKEESHEQSAEQGKSSSQELGLKDQEDSDGHLSVNLEYAPTEGTLDIKEDMSEPQEKKLSENTDFLAPGVSSFTDSNQQESITKREENQEQPRNYSHHQLNRSSKHSQGLRDQGNQEQDPNISNGEEEEEKEPGEVGTHNDNQERKTELPREHANSKQEEDNTQSDDILEESDQPTQVSKMQEDEFDQGNQEQEDNSNAEMEEENASNVNKHIQETEWQSQEGKTGLEAISNHKETEEKTVSEALLMEPTDDGNTTPRNHGVDDDGDDDGDDGGTDGPRHSASDDYFIPSQAFLEAERAQSIAYHLKIEEQREKVHENENIGTTEPGEHQEAKKAENSSNEEETSSEGNMRVHAVDSCMSFQCKRGHICKADQQGKPHCVCQDPVTCPPTKPLDQVCGTDNQTYASSCHLFATKCRLEGTKKGHQLQLDYFGACKSIPTCTDFEVIQFPLRMRDWLKNILMQLYEANSEHAGYLNEKQRNKVKKIYLDEKRLLAGDHPIDLLLRDFKKNYHMYVYPVHWQFSELDQHPMDRVLTHSELAPLRASLVPMEHCITRFFEECDPNKDKHITLKEWGHCFGIKEEDIDENLLF

SEQ ID NO: 36341 - protein, 539 aa, Homo sapiens
  REGION 1..539: note = ENSP00000422903
MSEPQEKKLSENTDFLAPGVSSFTDSNQQESITKREENQEQPRNYSHHQLNRSSKHSQGLRDQGNQEQDPNISNGEEEEEKEPGEVGTHNDNQERKTELPREHANSKQEEDNTQSDDILEESDQPTQVSKMQEDEFDQGNQEQEDNSNAEMEEENASNVNKHIQETEWQSQEGKTGLEAISNHKETEEKTVSEALLMEPTDDGNTTPRNHGVDDDGDDDGDDGGTDGPRHSASDDYFIPSQAFLEAERAQSIAYHLKIEEQREKVHENENIGTTEPGEHQEAKKAENSSNEEETSSEGNMRVHAVDSCMSFQCKRGHICKADQQGKPHCVCQDPVTCPPTKPLDQVCGTDNQTYASSCHLFATKCRLEGTKKGHQLQLDYFGACKSIPTCTDFEVIQFPLRMRDWLKNILMQLYEANSEHAGYLNEKQRNKVKKIYLDEKRLLAGDHPIDLLLRDFKKNYHMYVYPVHWQFSELDQHPMDRVLTHSELAPLRASLVPMEHCITRFFEECDPNKDKHITLKEWGHCFGIKEEDIDENLLF

SEQ ID NO: 36342 - protein, 18 aa, Homo sapiens
  REGION 1..18: note = ENSP00000445678
MSEPQEKKLSENTDFLAP

SEQ ID NO: 36343 - protein, 143 aa, Homo sapiens
  REGION 1..143: note = ENSP00000423483
MKTGLFFLCLLGTAAAIPTNARLLSDHSKPTAETVAPDNTAIPSLRAEAEENEKETAVSTEDDSHHKAEKSSVLKSKEESHEQSAEQGKSSSQELGLKDQEDSDGHLSVNLEYAPTEGTLDIKEDMSEPQEKKLSENTDFLAP

SEQ ID NO: 36344 - protein, 141 aa, Homo sapiens
  REGION 1..141: note = ENSP00000416971
MKTGLFFLCLLGTAAAIPTNARLLSDHSKPTAETVAPDNTAIPSLRAEAEENEKETAVSTEDDSHHKAEKSSVLKSKEESHEQSAEQGKSSSQELGLKDQEDSDGHLSVNLEYAPTEGTLDIKEDMSEPQEKKLSENTDFL

SEQ ID NO: 36345 - protein, 127 aa, Homo sapiens
  REGION 1..127: note = ENSP00000438188
MKTGLFFLCLLGTAAAIPTNARLLSDHSKPTAETVAPDNTAIPSLRAEAEENEKETAVSTEDDSHHKAEKSSVLKSKEESHEQSAEQGKSSSQELGLKDQEDSDGHLSVNLEYAPTEGTLDIKEDMS

SEQ ID NO: 36346 - protein, 120 aa, Homo sapiens
  REGION 1..120: note = ENSP00000423448
MKTGLFFLCLLGTAAAIPTNARLLSDHSKPTAETVAPDNTAIPSLRAEAEENEKETAVSTEDDSHHKAEKSSVLKSKEESHEQSAEQGKSSSQELGLKDQEDSDGHLSVNLEYAPTEGTL

SEQ ID NO: 36347 - protein, 89 aa, Homo sapiens
  REGION 1..89: note = ENSP00000444832
MKTGLFFLCLLGTAAAIPTNARLLSDHSKPTAETVAPDNTAIPSLRAEAEENEKETAVSTEDDSHHKAEKSSVLKSKEESHEQSAEQGK

SEQ ID NO: 36348 - protein, 56 aa, Homo sapiens
  REGION 1..56: note = ENSP00000406251
MKTGLFFLCLLGTAAAIPTNARLLSDHSKPTAETVAPDNTAIPSLRAEAEENEKET

SEQ ID NO: 36349 - protein, 664 aa, Homo sapiens; identical to SEQ ID NO: 36340
  REGION 1..664: note = ENSP00000414856

SEQ ID NO: 36350 - protein, 1277 aa, Homo sapiens
  REGION 1..1277: note = ENSP00000398560
MTQAAVRPWAPCLENMTTAPNGLGPGPAAPCAGSDLKDAKMVTSLACGNGVCGCSPGGDTDTQEAKLSPAKLVRLFSTSRKRTGAHPERPHSMVLVGNSSTWNTLASFRKMGSFKKLKSSVLKGIQSREGSNACSKGEASEHGLGKSIPNGAVPGAQASRGSPLAPGPACGALRPAEWGTLDGSDLEDTDDAFQRSTHRSRSLRRAYGLGRICLLDAPQNHATPTIATGQVPAVCEILVRDPENNSMGYRRSKSTDNLAFLKKSSFKRKSTSNLADLRTAHDARVPQRTLSSSSTDSQKLGSGRTKRWRSPIRAKDFDRVFKLVSNVTEAAWRRESPRSGAPSPGEASLRLQAHSRLHDDYSRRVSRSTEQDSRRGGAVMHGTTATCTVAPGFGSATSKGPHLDADTAVFPLETKSSWAVESDSSCTCSSLPSPIVQDVLSKDSCDPNAGSQLTFDPEQPPTPLRPTTPKPQSPQSPQSPGAGSASCHSNHSALSANSEESEGRAEEPAQREPGPVSLQDPLEATHGDEGSKDLLVNIGVAAGPEEKEKEEVVPDGPWRRSSSQDEERTEAQRTPKRRWGSGRRPRPRPFSDYGQLASRSLSIPEDSVAADPQKEDRVDEDPQASMTSASPEDQNAPVGCPKGARRRRPISVIGGVSLYGTNQTEELDNLLTQPASRPPMPAHQVPPYKAVSARFRPFTFSQSTPIGLDRVGRRRQMRASNVSSDGGTEPSALVDDNGSEEDFSYEDLCQASPRYLQPGGEQLAINELISDGNVVCAEALWDHVTMDDQELGFKAGDVIQVLEASNKDWWWGRSEDKEAWFPASFVRLRVNQEELSENSSSTPSEEQDEEASQSRHRHCENKQQMRTNVIREIMDTERVYIKHLRDICEGYIRQCRKHTGMFTVAQLATIFGNIEDIYKFQRKFLKDLEKQYNKEEPHLSEIGSCFLQNQEGFAIYSEYCNNHPGACLELANLMKQGKYRHFFEACRLLQQMIDIAIDGFLLTPVQKICKYPLQLAELLKYTTQEHGDYSNIKAAYEAMKNVACLINERKRKLESIDKIARWQVSIVGWEGLDILDRSSELIHSGELTKITKQGKSQQRTFFLFDHQLVSCKKDLLRRDMLYYKGRLDMDEMELVDLGDGRDKDCNLSVKNAFKLVSRTTDEVYLFCAKKQEDKARWLQACADERRRVQEDKEMGMEISENQKKLAMLNAQKAGHGKSKGYNRCPVAPPHQGLHPIHQRHITMPTSVPQQQVFGLAEPKRKSSLFWHTFNRLTPFRK

SEQ ID NO: 36351 - protein, 652 aa, Homo sapiens
  REGION 1..652: note = ENSP00000371527
MTSASPEDQNAPVGCPKGARRRRPISVIGGVSLYGTNQTEELDNLLTQPASRPPMPAHQVPPYKAVSARFRPFTFSQSTPIGLDRVGRRRQMRASNVSSDGGTEPSALVDDNGSEEDFSYEDLCQASPRYLQPGGEQLAINELISDGNVVCAEALWDHVTMDDQELGFKAGDVIQVLEASNKDWWWGRSEDKEAWFPASFVRLRVNQEELSENSSSTPSEEQDEEASQSRHRHCENKQQMRTNVIREIMDTERVYIKHLRDICEGYIRQCRKHTGMFTVAQLATIFGNIEDIYKFQRKFLKDLEKQYNKEEPHLSEIGSCFLQNQEGFAIYSEYCNNHPGACLELANLMKQGKYRHFFEACRLLQQMIDIAIDGFLLTPVQKICKYPLQLAELLKYTTQEHGDYSNIKAAYEAMKNVACLINERKRKLESIDKIARWQVSIVGWEGLDILDRSSELIHSGELTKITKQGKSQQRTFFLFDHQLVSCKKDLLRRDMLYYKGRLDMDEMELVDLGDGRDKDCNLSVKNAFKLVSRTTDEVYLFCAKKQEDKARWLQACADERRRVQEDKEMGMEISENQKKLAMLNAQKAGHGKSKGYNRCPVAPPHQGLHPIHQRHITMPTSVPQQQVFGLAEPKRKSSLFWHTFNRLTPFRK

SEQ ID NO: 36352 - protein, 550 aa, Homo sapiens
  REGION 1..550: note = ENSP00000401605
TDFAFFLQPASRPPMPAHQVPPYKAVSARFRPFTFSQSTPIGLDRVGRRRQMRASNVSSDGGTEPSALVDDNGSEEDFSYEDLCQASPRYLQPGGEQLAINELISDGNVVCAEALWDHVTMDDQELGFKAGDVIQVLEASNKDWWWGRSEDKEAWFPASFVRGYIRQCRKHTGMFTVAQLATIFGNIEDIYKFQRKFLKDLEKQYNKEEPHLSEIGSCFLQNQEGFAIYSEYCNNHPGACLELANLMKQGKYRHFFEACRLLQQMIDIAIDGFLLTPVQKICKYPLQLAELLKYTTQEHGDYSNIKAAYEAMKNVACLINERKRKLESIDKIARWQVSIVGWEGLDILDRSSELIHSGELTKITKQGKSQQRTFFLFDHQLVSCKKDLLRRDMLYYKGRLDMDEMELVDLGDGRDKDCNLSVKNAFKLVSRTTDEVYLFCAKKQEDKARWLQACADERRRVQEDKEMGMEISENQKKLAMLNAQKAGHGKSKGYNRCPVAPPHQGLHPIHQRHITMPTSVPQQQVFGLAEPKRKSSLFWHTFNRLTPFRK

SEQ ID NO: 36353 - protein, 23 aa, Homo sapiens
  REGION 1..23: note = ENSP00000477296
MGFIIHIQQVKKQRKKLDQGLIL

SEQ ID NO: 36354 - protein, 574 aa, Homo sapiens
  REGION 1..574: note = ENSP00000382830
MVARGEIARFWSLESLHLVSSDGGTEPSALVDDNGSEEDFSYEDLCQASPRYLQPGGEQLAINELISDGNVVCAEALWDHVTMDDQELGFKAGDVIQVLEASNKDWWWGRSEDKEAWFPASFVRLRVNQEELSENSSSTPSEEQDEEASQSRHRHCENKQQMRTNVIREIMDTERVYIKHLRDICEGYIRQCRKHTGMFTVAQLATIFGNIEDIYKFQRKFLKDLEKQYNKEEPHLSEIGSCFLQNQEGFAIYSEYCNNHPGACLELANLMKQGKYRHFFEACRLLQQMIDIAIDGFLLTPVQKICKYPLQLAELLKYTTQEHGDYSNIKAAYEAMKNVACLINERKRKLESIDKIARWQVSIVGWEGLDILDRSSELIHSGELTKITKQGKSQQRTFFLFDHQLVSCKKDLLRRDMLYYKGRLDMDEMELVDLGDGRDKDCNLSVKNAFKLVSRTTDEVYLFCAKKQEDKARWLQACADERRRVQEDKEMGMEISENQKKLAMLNAQKAGHGKSKGYNRCPVAPPHQGLHPIHQRHITMPTSVPQQQVFGLAEPKRKSSLFWHTFNRLTPFRK

SEQ ID NO: 36355 - protein, 512 aa, Homo sapiens
  REGION 1..512: note = ENSP00000386471
MVARGEIARFWSLESLHLVSSDGGTEPSALVDDNGSEEDFSYEDLCQASPRYLQPGGEQLAINELISDGNVVCAEALWDHVTMDDQELGFKAGDVIQVLEASNKDWWWGRSEDKEAWFPASFVRGYIRQCRKHTGMFTVAQLATIFGNIEDIYKFQRKFLKDLEKQYNKEEPHLSEIGSCFLQNQEGFAIYSEYCNNHPGACLELANLMKQGKYRHFFEACRLLQQMIDIAIDGFLLTPVQKICKYPLQLAELLKYTTQEHGDYSNIKAAYEAMKNVACLINERKRKLESIDKIARWQVSIVGWEGLDILDRSSELIHSGELTKITKQGKSQQRTFFLFDHQLVSCKKDLLRRDMLYYKGRLDMDEMELVDLGDGRDKDCNLSVKNAFKLVSRTTDEVYLFCAKKQEDKARWLQACADERRRVQEDKEMGMEISENQKKLAMLNAQKAGHGKSKGYNRCPVAPPHQGLHPIHQRHITMPTSVPQQQVFGLAEPKRKSSLFWHTFNRLTPFRK

SEQ ID NO: 36356 - protein, 146 aa, Homo sapiens
  REGION 1..146: note = ENSP00000397498
MGFIIHIQQVKKQRKKLDQGLILKKEKYRKEKKCASLSFEVSSDGGTEPSALVDDNGSEEDFSYEDLCQASPRYLQPGGEQLAINELISDGNVVCAEALWDHVTMDDQELGFKAGDVIQVLEASNKDWWWGRSEDKEAWFPASFVR

SEQ ID NO: 36357 - protein, 23 aa, Homo sapiens
  REGION 1..23: note = ENSP00000477304
MGFIIHIQQVKKQRKKLDQGLIL

SEQ ID NO: 36358 - protein, 596 aa, Homo sapiens
  REGION 1..596: note = ENSP00000343631
MGFIIHIQQVKKQRKKLDQGLILKKEKYRKEKKCASLSFEVSSDGGTEPSALVDDNGSEEDFSYEDLCQASPRYLQPGGEQLAINELISDGNVVCAEALWDHVTMDDQELGFKAGDVIQVLEASNKDWWWGRSEDKEAWFPASFVRLRVNQEELSENSSSTPSEEQDEEASQSRHRHCENKQQMRTNVIREIMDTERVYIKHLRDICEGYIRQCRKHTGMFTVAQLATIFGNIEDIYKFQRKFLKDLEKQYNKEEPHLSEIGSCFLQNQEGFAIYSEYCNNHPGACLELANLMKQGKYRHFFEACRLLQQMIDIAIDGFLLTPVQKICKYPLQLAELLKYTTQEHGDYSNIKAAYEAMKNVACLINERKRKLESIDKIARWQVSIVGWEGLDILDRSSELIHSGELTKITKQGKSQQRTFFLFDHQLVSCKKDLLRRDMLYYKGRLDMDEMELVDLGDGRDKDCNLSVKNAFKLVSRTTDEVYLFCAKKQEDKARWLQACADERRRVQEDKEMGMEISENQKKLAMLNAQKAGHGKSKGYNRCPVAPPHQGLHPIHQRHITMPTSVPQQQVFGLAEPKRKSSLFWHTFNRLTPFRK

SEQ ID NO: 36359 - protein, 1277 aa, Homo sapiens; identical to SEQ ID NO: 36350
  REGION 1..1277: note = ENSP00000371542

SEQ ID NO: 36360 - protein, 178 aa, Homo sapiens
  REGION 1..178: note = ENSP00000427257
MPIKPVGWICGQVLKNFSGRIEGIQKAIMDLVDEFKDEFPTILRLSQSNQVRKGSLFEIISFPAKTALTSIIYASYAALIYLAVCVNAVLKKVKNIFQEEESIRQNREESENCRKAFSEPVLSEPMFAEGEIKAKPYRSLPEKPDISDYPKLLANKQSNNIQVLHSVFDQSAEMNEQI

SEQ ID NO: 36361 - protein, 254 aa, Homo sapiens
  REGION 1..254: note = ENSP00000325491
MPIKPVGWICGQVLKNFSGRIEGIQKAIMDLVDEFKDEFPTILRLSQSNQKREPAQKTSKIRMAIALAKINRATLIRGLNSISRSSKSVAKLLHPQLACRLLELRDISGRLLREVNAPRQPLYNIQVRKGSLFEIISFPAKTALTSIIYASYAALIYLAVCVNAVLKKVKNIFQEEESIRQNREESENCRKAFSEPVLSEPMFAEGEIKAKPYRSLPEKPDISDYPKLLANKQSNNIQVLHSVFDQSAEMNEQI

SEQ ID NO: 36362 - protein, 254 aa, Homo sapiens; identical to SEQ ID NO: 36361
  REGION 1..254: note = ENSP00000274432

SEQ ID NO: 36363 - protein, 135 aa, Homo sapiens
  REGION 1..135: note = ENSP00000420883
MPIKPVGWICGQVLKNFSGRIEGIQKAIMDLVDEFKDEFPTILRLSQSNQKREPAQKTSKIRMAIALAKINRATLIRGLNSISRSSKSVAKLLHPQLACRLLELRDISGRLLREVNAPRQPLYNIQEKKMGLQLS

SEQ ID NO: 36364 - protein, 591 aa, Homo sapiens
  REGION 1..591: note = ENSP00000366690
MSLLTNYEGLRHQIERLVRENEELKKLVRLIRENHELKSAIKTQAGGLGISGFTSGLGEATAGLSSRQNNGVFLPPSPAVANERVLEEVGIMALAPLAEMLTSLQPSATPGSLMSPLTGTLSTLLSGPAPTSQSSPLTSFLTSPIAGPLTGTLASSLGLPSTGTLTPSSLVAGPVAMSQSSPLIAPVMGTVAVSLSSPLLSSTATPPGVSQNLLANPMSNLVLPEAPRLRLAEPLRGGPTGPQSPACVVPTATTKVPLSTEPPQSTQDPEPLSMAFAGAPLQTSTPIGAMGTPAPKTAFSFNTSDTQAQPSAAQEQVVPASVPTSPTTSPTVTVLASAPALAPQVATSYTPSSTTHIAQGAPHPPSRMHNSPTQNLPVPHCPPHNAHSPPRTSSSPASVNDSRGPRTTEPSTKSMMEVERKLAHRKTSKFPENPRESKQLAWERLVGEIAFQLDRRILSSIFPERVRLYGFTVSNIPEKIIQASLNPSDHKLDEKLCQRLTQRYVSVMNRLQSLGYNGRVHPALTEQLVNAYGILRERPELAASEGGPYTVDFLQRVVVETVHPGMLADALLLLSCLSQLAHDDGKPMFIW

SEQ ID NO: 36365 - protein, 441 aa, Homo sapiens
  REGION 1..441: note = ENSP00000387613
MSLLTNYEGLRHQIERLVRENEELKKLVRLIRENHELKSAIKTQAGGLGISGFTSGLGEATAGLSSRQNNGVFLPPSPAVANERVLEEVGIMALAPLAEMLTSLQPSATPGSLMSPLTGTLSTLLSGPAPTSQSSPLTSFLTSPIAGPLTGTLASSLGLPSTGTLTPSSLVAGPVAMSQSSPLIAPVMGTVAVSLSSPLLSSTATPPGVSQNLLANPMSNLVLPEAPRLRLAEPLRGGPTGPQSPACVVPTATTKVPLSTEPPQSTQDPEPLSMAFAGAPLQTSTPIGAMGTPAPKTAFSFNTSDTQAQPSAAQEQVVPASVPTSPTTSPTVTVLASAPALAPQVATSYTPSSTTHIAQGAPHPPSRMHNSPTQNLPVPHCPPHNAHSPPRTSSSPASVNDSRGPRTTEPSTKSMMEVERKLAHRKTSKFPENPRGFPEPQ

SEQ ID NO: 36366 - protein, 1068 aa, Homo sapiens
  REGION 1..1068: note = ENSP00000378898
MRSAAKPWNPAIRAGGHGPDRVRPLPAASSGMKSSKSSTSLAFESRLSRLKRASSEDTLNKPGSTAASGVVRLKKTATAGAISELTESRLRSGTGAFTTTKRTGIPAPREFSVTVSRERSVPRGPSNPRKSVSSPTSSNTPTPTKHLRTPSTKPKQENEGGEKAALESQVRELLAEAKAKDSEINRLRSELKKYKEKRTLNAEGTDALGPNVDGTSVSPGDTEPMIRALEEKNKNFQKELSDLEEENRVLKEKLIYLEHSPNSEGAASHTGDSSCPTSITQESSFGSPTGNQMSSDIDEYKKNIHGNALRTSGSSSSDVTKASLSPDASDFEHITAETPSRPLSSTSNPFKSSKCSTAGSSPNSVSELSLASLTEKIQKMEENHHSTAEELQATLQELSDQQQMVQELTAENEKLVDEKTILETSFHQHRERAEQLSQENEKLMNLLQERVKNEEPTTQEGKIIELEQKCTGILEQGRFEREKLLNIQQQLTCSLRKVEEENQGALEMIKRLKEENEKLNEFLELERHNNNMMAKTLEECRVTLEGLKMENGSLKSHLQGEKQKATEASAVEQTAESCEVQEMLKVARAEKDLLELSCNELRQELLKANGEIKHVSSLLAKVEKDYSYLKEICDHQAEQLSRTSLKLQEKASESDAEIKDMKETIFELEDQVEQHRAVKLHNNQLISELESSVIKLEEQKSDLERQLKTLTKQMKEETEEWRRFQADLQTAVVVANDIKCEAQQELRTVKRKLLEEEEKNARLQKELGDVQGHGRVVTSRAAPPPVDEEPESSEVDAAGRWPGVCVSRTSPTPPESATTVKSLIKSFDLGRPGGAGQNISVHKTPRSPLSGIPVRTAPAAAVSPMQRHSTYSSVRPASRGVTQRLDLPDLPLSDILKGRTETLKPDPHLRKSPSLESLSRPPSLGFGDTRLLSASTRAWKPQSKLSVERKDPLAALAREYGGSKRNALLKWCQKKTQGYANIDITNFSSSWSDGLAFCALLHTYLPAHIPYQELNSQEKKRNLLLAFEAAESVGIKPSLELSEMLYTDRPDWQSVMQYVAQIYKYFET

SEQ ID NO: 36367 - protein, 101 aa, Homo sapiens
  REGION 1..101: note = ENSP00000463006
MRSAAKPWNPAIRAGGHGPDRVRPLPAASSGMKSSKSSTSLAFESRLSRLKRASSEDTLNKPGSTAASGVVRLKKTATAGAISELTESRLRSGTGAFTTTK

SEQ ID NO: 36368 - protein, 78 aa, Homo sapiens
  REGION 1..78: note = ENSP00000461918
MRSAAKPWNPAIRAGGHGPDRVRPLPAASSGMKSSKSSTSLAFESRLSRLKRASSEDTLNKPGSTAASGVVRLKKTAT

SEQ ID NO: 36369 - protein, 132 aa, Homo sapiens
  REGION 1..132: note = ENSP00000464489
MRSAAKPWNPAIRAGGHGPDRVRPLPAASSGMKSSKSSTSLAFESRLSRLKRASSEDTLNKPGSTAASGVVRLKKTATAGAISELTESRLRSGTGAFTTTKRTGIPAPREFSVTVSRERSVPRGPSNPRKSV

SEQ ID NO: 36370 - protein, 19 aa, Homo sapiens
  REGION 1..19: note = ENSP00000462266
MRSAAKPWNPAIRAGGHGP

SEQ ID NO: 36371 - protein, 21 aa, Homo sapiens
  REGION 1..21: note = ENSP00000464639
MRSAAKPWNPAIRAGGHGPDR

SEQ ID NO: 36372 - protein, 790 aa, Homo sapiens
  REGION 1..790: note = ENSP00000378900
MRSAAKPWNPAIRAGGHGPDRVRPLPAASSGMKSSKSSTSLAFESRLSRLKRASSEDTLNKPGSTAASGVVRLKKTATAGAISELTESRLRSGTGAFTTTKRTGIPAPREFSVTVSRERSVPRGPSNPRKSVSSPTSSNTPTPTKHLRTPSTKPKQENEGGEKAALESQVRELLAEAKAKDSEINRLRSELKKYKEKRTLNAEGTDALGPNVDGTSVSPGDTEPMIRALEEKNKNFQKELSDLEEENRVLKEKLIYLEHSPNSEGAASHTGDSSCPTSITQESSFGSPTGNQMSSDIDEYKKNIHGNALRTSGSSSSDVTKASLSPDASDFEHITAETPSRPLSSTSNPFKSSKCSTAGSSPNSVSELSLASLTEKIQKMEENHHSTAEELQATLQELSDQQQMVQELTAENEKLVDEKTILETSFHQHRERAEQLSQENEKLMNLLQERVKNEEPTTQEGKIIELEQKCTGILEQGRFEREKLLNIQQQLTCSLRKVEEENQGALEMIKRLKEENEKLNEFLELERHNNNMMAKTLEECRVTLEGLKMENGSLKSHLQGEKQKATEASAVEQTAESCEVQEMLKVARAEKDLLELSCNELRQELLKANGEIKHVSSLLAKVEKDYSYLKEICDHQAEQLSRTSLKLQEKASESDAEIKDMKETIFELEDQVEQHRAVKLHNNQLISELESSVIKLEEQKSDLERQLKTLTKQMKEETEEWRRFQADLQTAVVVANDIKCEAQQELRTVKRKLLEEEEKNARLQKELGDVQGHGRVVTSRAAPPSLGSVS

SEQ ID NO: 36373 - protein, 1068 aa, Homo sapiens; identical to SEQ ID NO: 36366
  REGION 1..1068: note = ENSP00000261503

SEQ ID NO: 36374 - protein, 102 aa, Homo sapiens
  REGION 1..102: note = ENSP00000464341
MRSAAKPWNPAIRAGGHGPDRVRPLPAASSGMKSSKSSTSLAFESRLSRLKRASSEDTLNKPGSTAASGVVRLKKTATAGAISELTESRLRSGTGAFTTTKR

SEQ ID NO: 36375 - protein, 73 aa, Homo sapiens
  REGION 1..73: note = ENSP00000461944
MRSAAKPWNPAIRAGGHGPDRVRPLPAASSGMKSSKSSTSLAFESRLSRLKRASSEDTLNKPGSTAASGVVRL

SEQ ID NO: 36376 - protein, 987 aa, Homo sapiens
  REGION 1..987: note = ENSP00000378901
MGNHSGRPEDPEPGAFTTTKRTGIPAPREFSVTVSRERSVPRGPSNPRKSVSSPTSSNTPTPTKHLRTPSTKPKQENEGGEKAALESQVRELLAEAKAKDSEINRLRSELKKYKEKRTLNAEGTDALGPNVDGTSVSPGDTEPMIRALEEKNKNFQKELSDLEEENRVLKEKLIYLEHSPNSEGAASHTGDSSCPTSITQESSFGSPTGNQMSSDIDEYKKNIHGNALRTSGSSSSDVTKASLSPDASDFEHITAETPSRPLSSTSNPFKSSKCSTAGSSPNSVSELSLASLTEKIQKMEENHHSTAEELQATLQELSDQQQMVQELTAENEKLVDEKTILETSFHQHRERAEQLSQENEKLMNLLQERVKNEEPTTQEGKIIELEQKCTGILEQGRFEREKLLNIQQQLTCSLRKVEEENQGALEMIKRLKEENEKLNEFLELERHNNNMMAKTLEECRVTLEGLKMENGSLKSHLQGEKQKATEASAVEQTAESCEVQEMLKVARAEKDLLELSCNELRQELLKANGEIKHVSSLLAKVEKDYSYLKEICDHQAEQLSRTSLKLQEKASESDAEIKDMKETIFELEDQVEQHRAVKLHNNQLISELESSVIKLEEQKSDLERQLKTLTKQMKEETEEWRRFQADLQTAVVVANDIKCEAQQELRTVKRKLLEEEEKNARLQKELGDVQGHGRVVTSRAAPPPVDEEPESSEVDAAGRWPGVCVSRTSPTPPESATTVKSLIKSFDLGRPGGAGQNISVHKTPRSPLSGIPVRTAPAAAVSPMQRHSTYSSVRPASRGVTQRLDLPDLPLSDILKGRTETLKPDPHLRKSPSLESLSRPPSLGFGDTRLLSASTRAWKPQSKLSVERKDPLAALAREYGGSKRNALLKWCQKKTQGYANIDITNFSSSWSDGLAFCALLHTYLPAHIPYQELNSQEKKRNLLLAFEAAESVGIKPSLELSEMLYTDRPDWQSVMQYVAQIYKYFET

SEQ ID NO: 36377 - protein, 25 aa, Homo sapiens
  REGION 1..25: note = ENSP00000463130
MGNHSGRPEDPEPGGKGLFIPEGDM

SEQ ID NO: 36378 - protein, 703 aa, Homo sapiens
  REGION 1..703: note = ENSP00000378893
MGNHSGRPEDPEPGAFTTTKRTGIPAPREFSVTVSRERSVPRGPSNPRKSVSSPTSSNTPTPTKHLRTPSTKPKQENEGGEKAALESQVRELLAEAKAKDSEINRLRSELKKYKEKRTLNAEGTDALGPNVDGTSVSPGDTEPMIRALEEKNKNFQKELSDLEEENRVLKEKLIYLEHSPNSEGAASHTGDSSCPTSITQESSFGSPTGNQMSSDIDEYKKNIHGNALRTSGSSSSDVTKASLSPDASDFEHITAETPSRPLSSTSNPFKSSKCSTAGSSPNSVSELSLASLTEKIQKMEENHHSTAEELQATLQELSDQQQMVQELTAENEKLVDEKTILETSFHQHRERAEQLSQENEKLMNLLQERVKNEEPTTQEGKIIELEQKCTGILEQGRFEREKLLNIQQQLTCSLRKVEEENQGALEMIKRLKEENEKLNEFLELERHNNNMMAKTLEECRVTLEGLKMENGSLKSHLQGEKQKATEASAVEQTAESCEVQEMLKVARAEKDLLELSCNELRQELLKANGEIKHVSSLLAKVEKDYSYLKEICDHQAEQLSRTSLKLQEKASESDAEIKDMKETIFELEDQVEQHRAVKLHNNQLISELESSVIKLEEQKSDLERQLKTLTKQMKEETEEWRRFQADLQTAVVVANDIKCEAQQELRTVKRKLLEEEEKNARLQKELGDVQGHGRVVTSRAAPP

SEQ ID NO: 36379 - protein, 709 aa, Homo sapiens
  REGION 1..709: note = ENSP00000378896
MGNHSGRPEDPEPGAFTTTKRTGIPAPREFSVTVSRERSVPRGPSNPRKSVSSPTSSNTPTPTKHLRTPSTKPKQENEGGEKAALESQVRELLAEAKAKDSEINRLRSELKKYKEKRTLNAEGTDALGPNVDGTSVSPGDTEPMIRALEEKNKNFQKELSDLEEENRVLKEKLIYLEHSPNSEGAASHTGDSSCPTSITQESSFGSPTGNQMSSDIDEYKKNIHGNALRTSGSSSSDVTKASLSPDASDFEHITAETPSRPLSSTSNPFKSSKCSTAGSSPNSVSELSLASLTEKIQKMEENHHSTAEELQATLQELSDQQQMVQELTAENEKLVDEKTILETSFHQHRERAEQLSQENEKLMNLLQERVKNEEPTTQEGKIIELEQKCTGILEQGRFEREKLLNIQQQLTCSLRKVEEENQGALEMIKRLKEENEKLNEFLELERHNNNMMAKTLEECRVTLEGLKMENGSLKSHLQGEKQKATEASAVEQTAESCEVQEMLKVARAEKDLLELSCNELRQELLKANGEIKHVSSLLAKVEKDYSYLKEICDHQAEQLSRTSLKLQEKASESDAEIKDMKETIFELEDQVEQHRAVKLHNNQLISELESSVIKLEEQKSDLERQLKTLTKQMKEETEEWRRFQADLQTAVVVANDIKCEAQQELRTVKRKLLEEEEKNARLQKELGDVQGHGRVVTSRAAPPSLGSVS

SEQ ID NO: 36380 - protein, 534 aa, Homo sapiens
  REGION 1..534: note = ENSP00000462471
  VARIANT 1: note = Any amino acid
XKVEEENQGALEMIKRLKEENEKLNEFLELERHNNNMMAKTLEECRVTLEGLKMENGSLKSHLQGEKQKATEASAVEQTAESCEVQEMLKVARAEKDLLELSCNELRQELLKANGEIKHVSSLLAKVEKDYSYLKEICDHQAEQLSRTSLKLQEKASESDAEIKDMKETIFELEDQVEQHRAVKLHNNQLISELESSVIKLEEQKSDLERQLKTLTKQMKEETEEWRRFQADLQTAVVVANDIKCEAQQELRTVKRKLLEEEEKNARLQKELGDVQGHGRVVTSRAAPPPVDEEPESSEVDAAGRWPGVCVSRTSPTPPESATTVKSLIKSFDLGRPGGAGQNISVHKTPRSPLSGIPVRTAPAAAVSPMQRHSTYSSVRPASRGVTQRLDLPDLPLSDILKGRTETLKPDPHLRKSPSLESLSRPPSLGFGDTRLLSASTRAWKPQSKLSVERKDPLAALAREYGGSKRNALLKWCQKKTQGYAKRNLLLAFEAAESVGIKPSLELSEMLYTDRPDWQSVMQYVAQIYKYFET

SEQ ID NO: 36381 - protein, 167 aa, Homo sapiens
  REGION 1..167: note = ENSP00000462092
  VARIANT 1: note = Any amino acid
XATEASAVEQTAESCEVQEMLKVARAEKDLLELSCNELRQELLKANGEIKHVSSLLAKVEKDYSYLKEICDHQAEQLSRTSLKLQEKASESDAEIKDMKETIFELEDQVEQHRAVKLHNNQLISELESSVIKLEEQKSDLERQLKTLTKQMKKDSPALAMIGSRSHL

SEQ ID NO: 36382 - protein, 202 aa, Homo sapiens
  REGION 1..202: note = ENSP00000463799
MLKVARAEKDLLELSCNELRQELLKANGEIKHVSSLLAKVEKDYSYLKEICDHQAEQLSRTSLKLQEKASESDAEIKDMKETIFELEDQVEQHRAVKLHNNQLISELESSVIKLEEQKSDLERQLKTLTKQMKEETEEWRRFQADLQTAVVVANDIKCEAQQELRTVKRKLLEEEEKNARLQKELGDVQGHGRVVTSRAAPP

SEQ ID NO: 36383 - protein, 46 aa, Homo sapiens
  REGION 1..46: note = ENSP00000462987
  VARIANT 1: note = Any amino acid
XPAHIPYQELNSQEKKRNLLLAFEAAESVGIKPSLVRILFCILVIL

SEQ ID NO: 36384 - protein, 3267 aa, Homo sapiens
  REGION 1..3267: note = ENSP00000311684
MQKARGTRGEDAGTRAPPSPGVPPKRAKVGAGGGAPVAVAGAPVFLRPLKNAAVCAGSDVRLRVVVSGTPQPSLRWFRDGQLLPAPAPEPSCLWLRRCGAQDAGVYSCMAQNERGRASCEAVLTVLEVGDSETAEDDISDVQGTQRLELRDDGAFSTPTGGSDTLVGTSLDTPPTSVTGTSEEQVSWWGSGQTVLEQEAGSGGGTRRLPGSPRQAQATGAGPRHLGVEPLVRASRANLVGASWGSEDSLSVASDLYGSAFSLYRGRALSIHVSVPQSGLRREEPDLQPQLASEAPRRPAQPPPSKSALLPPPSPRVGKRSPPGPPAQPAATPTSPHRRTQEPVLPEDTTTEEKRGKKSKSSGPSLAGTAESRPQTPLSEASGRLSALGRSPRLVRAGSRILDKLQFFEERRRSLERSDSPPAPLRPWVPLRKARSLEQPKSERGAPWGTPGASQEELRAPGSVAERRRLFQQKAASLDERTRQRSPASDLELRFAQELGRIRRSTSREELVRSHESLRATLQRAPSPREPGEPPLFSRPSTPKTSRAVSPAAAQPPSPSSAEKPGDEPGRPRSRGPAGRTEPGEGPQQEVRRRDQFPLTRSRAIQECRSPVPPPAADPPEARTKAPPGRKREPPAQAVRFLPWATPGLEGAAVPQTLEKNRAGPEAEKRLRRGPEEDGPWGPWDRRGARSQGKGRRARPTSPELESSDDSYVSAGEEPLEAPVFEIPLQNVVVAPGADVLLKCIITANPPPQVSWHKDGSALRSEGRLLLRAEGERHTLLLREARAADAGSYMATATNELGQATCAASLTVRPGGSTSPFSSPITSDEEYLSPPEEFPEPGETWPRTPTMKPSPSQNRRSSDTGSKAPPTFKVSLMDQSVREGQDVIMSIRVQGEPKPVVSWLRNRQPVRPDQRRFAEEAEGGLCRLRILAAERGDAGFYTCKAVNEYGARQCEARLEVRAHPESRSLAVLAPLQDVDVGAGEMALFECLVAGPTDVEVDWLCRGRLLQPALLKCKMHFDGRKCKLLLTSVHEDDSGVYTCKLSTAKDELTCSARLTVRPSLAPLFTRLLEDVEVLEGRAARFDCKISGTPPPVVTWTHFGCPMEESENLRLRQDGGLHSLHIAHVGSEDEGLYAVSAVNTHGQAHCSAQLYVEEPRTAASGPSSKLEKMPSIPEEPEQGELERLSIPDFLRPLQDLEVGLAKEAMLECQVTGLPYPTISWFHNGHRIQSSDDRRMTQYRDVHRLVFPAVGPQHAGVYKSVIANKLGKAACYAHLYVTDVVPGPPDGAPQVVAVTGRMVTLTWNPPRSLDMAIDPDSLTYTVQHQVLGSDQWTALVTGLREPGWAATGLRKGVQHIFRVLSTTVKSSSKPSPPSEPVQLLEHGPTLEEAPAMLDKPDIVYVVEGQPASVTVTFNHVEAQVVWRSCRGALLEARAGVYELSQPDDDQYCLRICRVSRRDMGALTCTARNRHGTQTCSVTLELAEAPRFESIMEDVEVGAGETARFAVVVEGKPLPDIMWYKDEVLLTESSHVSFVYEENECSLVVLSTGAQDGGVYTCTAQNLAGEVSCKAELAVHSAQTAMEVEGVGEDEDHRGRRLSDFYDIHQEIGRGAFSYLRRIVERSSGLEFAAKFIPSQAKPKASARREARLLARLQHDCVLYFHEAFERRRGLVIVTELCTEELLERIARKPTVCESEIRAYMRQVLEGIHYLHQSHVLHLDVKPENLLVWDGAAGEQQVRICDFGNAQELTPGEPQYCQYGTPEFVAPEIVNQSPVSGVTDIWPVGVVAFLCLTGISPFVGENDRTTLMNIRNYNVAFEETTFLSLSREARGFLIKVLVQDRLRPTAEETLEHPWFKTQAKGAEVSTDHLKLFLSRRRWQRSQISYKCHLVLRPIPELLRAPPERVWVTMPRRPPPSGGLSSSSDSEEEELEELPSVPRPLQPEFSGSRVSLTDIPTEDEALGTPETGAATPMDWQEQGRAPSQDQEAPSPEALPSPGQEPAAGASPRRGELRRGSSAESALPRAGPRELGRGLHKAASVELPQRRSPSPGATRLARGGLGEGEYAQRLQALRQRLLRGGPEDGKVSGLRGPLLESLGGRARDPRMARAASSEAAPHHQPPLENRGLQKSSSFSQGEAEPRGRHRRAGAPLEIPVARLGARRLQESPSLSALSEAQPSSPARPSAPKPSTPKSAEPSATTPSDAPQPPAPQPAQDKAPEPRPEPVRASKPAPPPQALQTLALPLTPYAQIIQSLQLSGHAQGPSQGPAAPPSEPKPHAAVFARVASPPPGAPEKRVPSAGGPPVLAEKARVPTVPPRPGSSLSSSIENLESEAVFEAKFKRSRESPLSLGLRLLSRSRSEERGPFRGAEEEDGIYRPSPAGTPLELVRRPERSRSVQDLRAVGEPGLVRRLSLSLSQRLRRTPPAQRHPAWEARGGDGESSEGGSSARGSPVLAMRRRLSFTLERLSSRLQRSGSSEDSGGASGRSTPLFGRLRRATSEGESLRRLGLPHNQLAAQAGATTPSAESLGSEASATSGSSAPGESRSRLRWGFSRPRKDKGLSPPNLSASVQEELGHQYVRSESDFPPVFHIKLKDQVLLEGEAATLLCLPAACPAPHISWMKDKKSLRSEPSVIIVSCKDGRQLLSIPRAGKRHAGLYECSATNVLGSITSSCTVAVARVPGKLAPPEVPQTYQDTALVLWKPGDSRAPCTYTLERRVDGESVWHPVSSGIPDCYYNVTHLPVGVTVRFRVACANRAGQGPFSNSSEKVFVRGTQDSSAVPSAAHQEAPVTSRPARARPPDSPTSLAPPLAPAAPTPPSVTVSPSSPPTPPSQALSSLKAVGPPPQTPPRRHRGLQAARPAEPTLPSTHVTPSEPKPFVLDTGTPIPASTPQGVKPVSSSTPVYVVTSFVSAPPAPEPPAPEPPPEPTKVTVQSLSPAKEVVSSPGSSPRSSPRPEGTTLRQGPPQKPYTFLEEKARGRFGVVRACRENATGRTFVAKIVPYAAEGKRRVLQEYEVLRTLHHERIMSLHEAYITPRYLVLIAESCGNRELLCGLSDRFRYSEDDVATYMVQLLQGLDYLHGHHVLHLDIKPDNLLLAPDNALKIVDFGSAQPYNPQALRPLGHRTGTLEFMAPEMVKGEPIGSATDIWGAGVLTYIMLSGRSPFYEPDPQETEARIVGGRFDAFQLYPNTSQSATLFLRKVLSVHPWSRPSLQDCLAHPWLQDAYLMKLRRQTLTFTTNRLKEFLGEQRRRRAEAATRHKVLLRSYPGGP

SEQ ID NO: 36385 - protein, 187 aa, Homo sapiens
  REGION 1..187: note = ENSP00000393134
MLLTFQRGPAGGENRPFPPGLWPTHPCEVFRSCRKQSYDSETAEDDISDVQGTQRLELRDDGAFSTPTGGSDTLVGTSLDTPPTSVTGTSEEQVSWWGSGQTVLEQEAGSGGGTRRLPGSPSSVPQSGLRREEPDLQPQLASEAPRRPAQPPPSKSALLPPPSPRVGKRSPPGPPAQPAATPTSPHR

SEQ ID NO: 36386 - protein, 53 aa, Homo sapiens
  REGION 1..53: note = ENSP00000383902
MKKLWVKKRFQKTGHSRRAFGRLTHGAWTVGVLALAHAYSSSWSLSLCEASSS

SEQ ID NO: 36387 - protein, 299 aa, Homo sapiens
  REGION 1..299: note = ENSP00000410986
MKKLWVKKRFQKTGHSRRAFGRLTHVFRSCRKQSYDSETAEDDISDVQGTQRLELRDDGAFSTPTGGSDTLVGTSLDTPPTSVTGTSEEQVSWWGSGQTVLEQEAGSGGGTRRLPGSPSSVPQSGLRREEPDLQPQLASEAPRRPAQPPPSKSALLPPPSPRVGKRSPPGPPAQPAATPTSPHRRTQEPVLPEDTTTEEKRGKKSKSSGPSLAGTAESRPQTPLSEASGRLSALGRSPRLVRAGSRILDKLQFFEERRRSLERSDSPPAPLRPWVPLRKARSLEQPKSERGAPWGTPGA

SEQ ID NO: 36388 - protein, 858 aa, Homo sapiens
  REGION 1..858: note = ENSP00000379926
MKKLWVKKRFQKTGHSRRAFGRLTHDSETAEDDISDVQGTQRLELRDDGAFSTPTGGSDTLVGTSLDTPPTSVTGTSEEQVSWWGSGQTVLEQEAGSGGGTRRLPGSPRQAQATGAGPRHLGVEPLVRASRANLVGASWGSEDSLSVASDLYGSAFSLYRGRALSIHVSVPQSGLRREEPDLQPQLASEAPRRPAQPPPSKSALLPPPSPRVGKRSPPGPPAQPAATPTSPHRRTQEPVLPEDTTTEEKRGKKSKSSGPSLAGTAESRPQTPLSEASGRLSALGRSPRLVRAGSRILDKLQFFEERRRSLERSDSPPAPLRPWVPLRKARSLEQPKSERGAPWGTPGASQEELRAPGSVAERRRLFQQKAASLDERTRQRSPASDLELRFAQELGRIRRSTSREELVRSHESLRATLQRAPSPREPGEPPLFSRPSTPKTSRAVSPAAAQPPSPSSAEKPGDEPGRPRSRGPAGRTEPGEGPQQEVRRRDQFPLTRSRAIQECRSPVPPPAADPPEARTKAPPGRKREPPAQAVRFLPWATPGLEGAAVPQTLEKNRAGPEAEKRLRRGPEEDGPWGPWDRRGARSQGKGRRARPTSPELESSDDSYVSAGEEPLEAPVFEIPLQNVVVAPGADVLLKCIITANPPPQVSWHKDGSALRSEGRLLLRAEGERHTLLLREARAADAGSYMATATNELGQATCAASLTVRPGGSTSPFSSPITSDEEYLSPPEEFPEPGETWPRTPTMKPSPSQNRRSSDTGSKAPPTFKVSLMDQSVREGQDVIMSIRVQGEPKPVVSWLRNRQPVRPDQRRFAEEAEGGLCRLRILAAERGDAGFYTCKAVNEYGARQCEARLEVRGE

SEQ ID NO: 36389 - protein, 84 aa, Homo sapiens
  REGION 1..84: note = ENSP00000406530
MKKLWVKKRFQKTGHSRRAFGRLTHAKFSAPAESKVTTQRRLRMTSAMCREPSAWSFGMTGPSAPPRGVLTPWWAPPWTHPRPP

SEQ ID NO: 36390 - protein, 53 aa, Homo sapiens; identical to SEQ ID NO: 36386
  REGION 1..53: note = ENSP00000397514

SEQ ID NO: 36391 - protein, 184 aa, Homo sapiens
  REGION 1..184: note = ENSP00000414549
  VARIANT 1: note = Any amino acid
XETAEDDISDVQGTQRLELRDDGAFSTPTGTSEEQVSWWGSGQTVLEQEAGSGGGTRRLPGSPRQAQATGAGPRHLGVEPLVRASRANLVGASWGSEDSLSVASDLYGSAFSLYRGRALSIHVSVPQSGLRREEPDLQPQLASEAPRRPAQPPPSKSALLPPPSPRVGKRSPPGPPAQPAATPT

SEQ ID NO: 36392 - protein, 43 aa, Homo sapiens
  REGION 1..43: note = ENSP00000387344
  VARIANT 1: note = Any amino acid
XSRANLVGASWGSEDSLSVASDLYGSAFSLYRGRALSIHVVFG

SEQ ID NO: 36393 - protein, 113 aa, Homo sapiens
  REGION 1..113: note = ENSP00000379919
MKPSPSQNRRSSDTGSKAPPTFKVSLMDQSVREGQDVIMSIRVQGEPKPVVSWLRNRQPVRPDQRRFAEEAEGGLCRLRILAAERGDAGFYTCKAVNEYGARQCEARLEVRGE

SEQ ID NO: 36394 - protein, 113 aa, Homo sapiens; identical to SEQ ID NO: 36393
  REGION 1..113: note = ENSP00000379917

SEQ ID NO: 36395 - protein, 113 aa, Homo sapiens; identical to SEQ ID NO: 36393
  REGION 1..113: note = ENSP00000379920

SEQ ID NO: 36396 - protein, 343 aa, Homo sapiens
  REGION 1..343: note = ENSP00000390353
  VARIANT 1: note = Any amino acid
XMLSGRSPFYEPDPQETEARIVGGRFDAFQLYPNTSQSATLFLRKVLSVHPWSRPSLQDCLAHPWLQDAYLMKLRRQTLTFTTNRLKEFLGEQRRRRAEAATRHKMSKAAPAKKPVAVAPAPGCTLDINDPQVQSAAIRIQASYRGHRSRKELREKGPPRVLEPLKDVVLIEGSAAKLTCRISAFPDPFIRWSKDGKELRDGPKYRYVFEDPDVVALVVRDGELADLGQYSINVTNPFGQCSDSARILVEVPTKIQKGPDNTKARKGTTVTLTAEILGEPAPDVGWTKDGEDIEEDDRVFFEIGSTTTTLTIRRATPQDSGKYEVYVENSLGMDQSFARVDVA

SEQ ID NO: 36397 - protein, 238 aa, Homo sapiens
  REGION 1..238: note = ENSP00000479190
MSKAAPAKKPVAVAPAPGCTLDINDPQVQSAAIRIQASYRGHRSRKELREKGPPRVLEPLKDVVLIEGSAAKLTCRISAFPDPFIRWSKDGKELRDGPKYRYVFEDPDVVALVVRDGELADLGQYSINVTNPFGQCSDSARILVEVPTKIQKGPDNTKARKGTTVTLTAEILGEPAPDVGWTKDGEDIEEDDRVFFEIGSTTTTLTIRRATPQDSGKYEVYVENSLGMDQSFARVDVA

SEQ ID NO: 36398 - protein, 654 aa, Homo sapiens
  REGION 1..654: note = ENSP00000245222
MNGHLEAEEQQDQRPDQELTGSWGHGPRSTLVRAKAMAPPPPPLAASTPLLHGEFGSYPARGPRFALTLTSQALHIQRLRPKPEARPRGGLVPLAEVSGCCTLRSRSPSDSAAYFCIYTYPRGRRGARRRATRTFRADGAATYEENRAEAQRWATALTCLLRGLPLPGDGEITPDLLPRPPRLLLLVNPFGGRGLAWQWCKNHVLPMISEAGLSFNLIQTERQNHARELVQGLSLSEWDGIVTVSGDGLLHEVLNGLLDRPDWEEAVKMPVGILPCGSGNALAGAVNQHGGFEPALGLDLLLNCSLLLCRGGGHPLDLLSVTLASGSRCFSFLSVAWGFVSDVDIQSERFRALGSARFTLGTVLGLATLHTYRGRLSYLPATVEPASPTPAHSLPRAKSELTLTPDPAPPMAHSPLHRSVSDLPLPLPQPALASPGSPEPLPILSLNGGGPELAGDWGGAGDAPLSPDPLLSSPPGSPKAALHSPVSEGAPVIPPSSGLPLPTPDARVGASTCGPPDHLLPPLGTPLPPDWVTLEGDFVLMLAISPSHLGADLVAAPHARFDDGLVHLCWVRSGISRAALLRLFLAMERGSHFSLGCPQLGYAAARAFRLEPLTPRGVLTVDGEQVEYGPLQAQMHPGIGTLLTGPPGCPGREP

SEQ ID NO: 36399 - protein, 255 aa, Homo sapiens
  REGION 1..255: note = ENSP00000471180
MAPPPPPLAASTPLLHGEFGSYPARGPRFALTLTSQALHIQRLRPKPEARPRGGLVPLAEVSGCCTLRSRSPSDSAAYFCIYTYPRGRRGARRRATRTFRADGAATYEENRAEAQRWATALTCLLRGLPLPGDGEITPDLLPRPPRLLLLVNPFGGRGLAWQWCKNHVLPMISEAGLSFNLIQTERQNHARELVQGLSLSEWDGIVTVSGDGLLHEVLNGLLDRPDWEEAVKMPVGILPCGSGNALAGAVNQHGG

SEQ ID NO: 36400 - protein, 595 aa, Homo sapiens
  REGION 1..595: note = ENSP00000470092
MNGHLEAEEQQDQALHIQRLRPKPEARPRGGLVPLAEVSGCCTLRSRSPSDSAAYFCIYTYPRGRRGARRRATRTFRADGAATYEENRAEAQRWATALTCLLRGLPLPGDGEITPDLLPRPPRLLLLVNPFGGRGLAWQWCKNHVLPMISEAGLSFNLIQTERQNHARELVQGLSLSEWDGIVTVSGDGLLHEVLNGLLDRPDWEEAVKMPVGILPCGSGNALAGAVNQHGGFEPALGLDLLLNCSLLLCRGGGHPLDLLSVTLASGSRCFSFLSVAWGFVSDVDIQSERFRALGSARFTLGTVLGLATLHTYRGRLSYLPATVEPASPTPAHSLPRAKSELTLTPDPAPPMAHSPLHRSVSDLPLPLPQPALASPGSPEPLPILSLNGGGPELAGDWGGAGDAPLSPDPLLSSPPGSPKAALHSPVSEGAPVIPPSSGLPLPTPDARVGASTCGPPDHLLPPLGTPLPPDWVTLEGDFVLMLAISPSHLGADLVAAPHARFDDGLVHLCWVRSGISRAALLRLFLAMERGSHFSLGCPQLGYAAARAFRLEPLTPRGVLTVDGEQVEYGPLQAQMHPGIGTLLTGPPGCPGREP

SEQ ID NO: 36401 - protein, 654 aa, Homo sapiens; identical to SEQ ID NO: 36398
  REGION 1..654: note = ENSP00000469158

SEQ ID NO: 36402 - protein, 49 aa, Homo sapiens
  REGION 1..49: note = ENSP00000410044
MNGHLEAEEQQDQRSPLTCYLGRPGCFYWSIPLGVGAWPGSGVRTTCFP

SEQ ID NO: 36403 - protein, 349 aa, Homo sapiens
  REGION 1..349: note = ENSP00000471111
MAPPPPPLAASTPLLHGEFGSYPARGPRFALTLTSQALHIQRLRPKPEARPRGGLVPLAEVSGCCTLRSRSPSDSAAYFCIYTYPRGRRGARRRATRTFRADGAATYEENRAEAQRWATALTCLLRGLPLPGDGEITPDLLPRPPRLLLLVNPFGGRGLAWQWCKNHVLPMISEAGLSFNLIQTERQNHARELVQGLSLSEWDGIVTVSGDGLLHEVLNGLLDRPDWEEAVKMPVGILPCGSGNALAGAVNQHGGPREDSDSSTSSSACPLWTTARSCPRAAASMPGSCPLLPQQLALGFSRFIQDRVNGGGGRIGSLTCRGHTQRTLPAPAREGGGSLFLKNINVFIC

SEQ ID NO: 36404 - protein, 133 aa, Homo sapiens
  REGION 1..133: note = ENSP00000469448
MAPPPPPLAASTPLLHGEFGSYPARGPRFALTLTSQALHIQRLRPKPEARPRGGLVPLAEVSGCCTLRSRSPSDSAAYFCIYTYPRGRRGARRRATRTFRADGAATYEENRAEAQRWATALTCLLRGLPLPGD

SEQ ID NO: 36405 - protein, 72 aa, Homo sapiens
  REGION 1..72: note = ENSP00000470679
MAPPPPPLAASTPLLHGEFGSYPARGPRFALTLTSQALHIQRLRPKPEARPRGGLVPLAEVSGCCTLRSRSP

SEQ ID NO: 36406 - protein, 618 aa, Homo sapiens
  REGION 1..618: note = ENSP00000471205
MAPPPPPLAASTPLLHGEFGSYPARGPRFALTLTSQALHIQRLRPKPEARPRGGLVPLAEVSGCCTLRSRSPSDSAAYFCIYTYPRGRRGARRRATRTFRADGAATYEENRAEAQRWATALTCLLRGLPLPGDGEITPDLLPRPPRLLLLVNPFGGRGLAWQWCKNHVLPMISEAGLSFNLIQTERQNHARELVQGLSLSEWDGIVTVSGDGLLHEVLNGLLDRPDWEEAVKMPVGILPCGSGNALAGAVNQHGGFEPALGLDLLLNCSLLLCRGGGHPLDLLSVTLASGSRCFSFLSVAWGFVSDVDIQSERFRALGSARFTLGTVLGLATLHTYRGRLSYLPATVEPASPTPAHSLPRAKSELTLTPDPAPPMAHSPLHRSVSDLPLPLPQPALASPGSPEPLPILSLNGGGPELAGDWGGAGDAPLSPDPLLSSPPGSPKAALHSPVSEGAPVIPPSSGLPLPTPDARVGASTCGPPDHLLPPLGTPLPPDWVTLEGDFVLMLAISPSHLGADLVAAPHARFDDGLVHLCWVRSGISRAALLRLFLAMERGSHFSLGCPQLGYAAARAFRLEPLTPRGVLTVDGEQVEYGPLQAQMHPGIGTLLTGPPGCPGREP

SEQ ID NO: 36407 - protein, 663 aa, Homo sapiens
  REGION 1..663: note = ENSP00000472983
MAPPPPPLAASTPLLHGEFGSYPARGPRFALTLTSQALHIQRLRPKPEARPRGGLVPLAEVSGCCTLRSRSPSDSAAYFCIYTYPRGRRGARRRATRTFRADGAATYEENRAEAQRWATALTCLLRGLPLPGDGEITPDLLPRPPRLLLLVNPFGGRGLAWQWCKNHVLPMISEAGLSFNLIQTERQNHARELVQGLSLSEWDGIVTVSGDGLLHEVLNGLLDRPDWEEAVKMPVGILPCGSGNALAGAVNQHGGFEPALGLDLLLNCSLLLCRGGGHPLDLLSVTLASGSRCFSFLSVAWGFVSDVDIQSERFRALGSARFTLGTVLGLATLHTYRGRLSYLPATVEPASPTPAHSLPRAKSELTLTPDPAPPMAHSPLHRSVSDLPLPLPQPALASPGSPEPLPILSLNGGGPELAGDWGGAGDAPLSPDPLLSSPPGSPKAALHSPVSEGAPVIPPSSGLPLPTPDARVGASTCGPPDHLLPPLGTPLPPDWVTLEGDFVLMLAISPSHLGADLVAAPHARFDDGLVHLCWVRSGISRAALLRLFLAMERGSHFSLGCPQLGYAAARAFRLEPLTPRGVLTVDGEQVEYGPLQAQMHPGIARGRTQTPALPAAPALYGRQPGAAHGLQPVCQGAALFFHNSWLWGSQDLFRIVLTEAVGG

SEQ ID NO: 36408 - protein, 448 aa, Homo sapiens
  REGION 1..448: note = ENSP00000341091
MISEAGLSFNLIQTERQNHARELVQGLSLSEWDGIVTVSGDGLLHEVLNGLLDRPDWEEAVKMPVGILPCGSGNALAGAVNQHGGFEPALGLDLLLNCSLLLCRGGGHPLDLLSVTLASGSRCFSFLSVAWGFVSDVDIQSERFRALGSARFTLGTVLGLATLHTYRGRLSYLPATVEPASPTPAHSLPRAKSELTLTPDPAPPMAHSPLHRSVSDLPLPLPQPALASPGSPEPLPILSLNGGGPELAGDWGGAGDAPLSPDPLLSSPPGSPKAALHSPVSEGAPVIPPSSGLPLPTPDARVGASTCGPPDHLLPPLGTPLPPDWVTLEGDFVLMLAISPSHLGADLVAAPHARFDDGLVHLCWVRSGISRAALLRLFLAMERGSHFSLGCPQLGYAAARAFRLEPLTPRGVLTVDGEQVEYGPLQAQMHPGIGTLLTGPPGCPGREP

SEQ ID NO: 36409 - protein, 1700 aa, Homo sapiens
  REGION 1..1700: note = ENSP00000375909
MDGNSLLSVPSNLESSRMYDVLEPQQGRGCGSSGSGPGNSITACKKVLRSNSLLESTDYWLQNQRMPCQIGFVEDKSENCASVCFVNLDVNKDECSTEHLQQKLVNVSPDLPKLISSMNVQQPKENEIVVLSGLASGNLQADFEVSQCPWLPDICLVQCARGNRPNSTNCIIFEINKFLIGLELVQERQLHLETNILKLEDDTNCSLSSIEEDFLTASEHLEEESEVDESRNDYENINVSANVLESKQLKGATQVEWNCNKEKWLYALEDKYINKYPTPLIKTERSPENLTKNTALQSLDPSAKPSQWKREAVGNGRQATHYYHSEAFKGQMEKSQALYIPKDAYFSMMDKDVPSACAVAEQRSNLNPGDHEDTRNALPPRQDGEVTTGKYATNLAESVLQDAFIRLSQSQSTLPQESAVSVSVGSSLLPSCYSTKDTVVSRSWNELPKIVVVQSPDGSDAAPQPGISSWPEMEVSVETSSILSGENSSRQPQSALEVALACAATVIGTISSPQATERLKMEQVVSNFPPGSSGALQTQAPQGLKEPSINEYSFPSALCGMTQVASAVAVCGLGEREEVTCSVAPSGSLPPAAEASEAMPPLCGLASMELGKEAIAKGLLKEAALVLTRPNTYSSIGDFLDSMNRRIMETASKSQTLCSENVVRNELAHTLSNVILRHSIDEVHHKNMIIDPNDNRHSSEILDTLMESTNQLLLDVICFTFKKMSHIVRLGECPAVLSKETIRRRETEPSCQPSDPGASQAWTKATESSSSSPLSNSHNTSLVINNLVDGMYSKQDKGGVRPGLFKNPTLQSQLSRSHRVPDSSTATTSSKEIYLKGIAGEDTKSPHHSENECRASSEGQRSPTVSQSRSGSQEAEESIHPNTQEKYNCATSRINEVQVNLSLLGDDLLLPAQSTLQTKHPDIYCITDFAEELADTVVSMATEIAAICLDNSSGKQPWFCAWKRGSEFLMTPNVPCRSLKRKKESQGSGTAVRKHKPPRLSEIKRKTDEHPELKEKLMNRVVDESMNLEDVPDSVNLFANEVAAKIMNLTEFSMVDGMWQAQGYPRNRLLSGDRWSRLKASSCESIPEEDSEARAYVNSLGLMSTLSQPVSRASSVSKQSSCESITDEFSRFMVNQMENEGRGFELLLDYYAGKNASSILNSAMQQACRKSDHLSVRPSCPSKQSSTESITEEFYRYMLRDIERDSRESASSRRSSQDWTAGLLSPSLRSPVCHRQSSMPDSRSPCSRLTVNVPIKANSLDGFAQNCPQDFLSVQPVSSASSSGLCKSDSCLYRRGGTDHITNMLIHETWASSIEALMRKNKIIVDDAEEADTEPVSGGSPSQAEKCANRLAASRMCSGPTLLVQESLDCPRKDSVTECKQPPVSSLSKTASLTNHSPLDSKKETSSCQDPVPINHKRRSLCSREVPLIQIETDQREACAGEPEPFLSKSSLLEEAEGHSNDKNIPDVVRGGDTAVSACQIHSDSLDTRDVPEAEASTEARAPDEAPNPPSSSEESTGSWTQLANEEDNPDDTSSFLQLSERSMSNGNSSATSSLGIMDLDIYQESMPSSPMINELVEEKKILKGQSESTEAPASGPPTGTASPQRSLLVINFDLEPECPDAELRATLQWIAASELGIPTIYFKKSQENRIEKFLDVVQLVHRKSWKVGDIFHAVVQYCKMHEEQKDGRLSLFDWLLELG

SEQ ID NO: 36410 - protein, 1671 aa, Homo sapiens
  REGION 1..1671: note = ENSP00000339886
MDGNSLLSVPSNLESSRMYDVLEPQQGRGCGSSGSGPGNSITACKKVLRSNSLLESTDYWLQNQRMPCQIGFVEDKSENCASVCFVNLDVNKDECSTEHLQQKLVNVSPDLPKLISSMNVQQPKENEIVVLSGLASGNLQADFEVSQCPWLPDICLVQCARGNRPNSTNCIIFEINKFLIGLELVQERQLHLETNILKLEDDTNCSLSSIEEDFLTASEHLEEESEVDESRNDYENINVSANVLESKQLKGATQVEWNCNKEKWLYALEDKYINKYPTPLIKTERSPENLTKNTALQSLDPSAKPSQWKREAVGNGRQATHYYHSEAFKGQMEKSQALYIPKDAYFSMMDKDVPSACAVAEQRSNLNPGDHEDTRNALPPRQDGEVTTGKYATNLAESVLQDAFIRLSQSQSTLPQESAVSVSVGSSLLPSCYSTKDTVVSRSWNELPKIVVVQSPDGSDAAPQPGISSWPEMEVSVETSSILSGENSSRQPQSALEVALACAATVIGTISSPQATERLKMEQVVSNFPPGSSGALQTQAPQGLKEPSINEYSFPSALCGMTQVASAVAVCGLGEREEVTCSVAPSGSLPPAAEASEAMPPLCGLASMELGKEAIAKGLLKEAALVLTRPNTYSSIGDFLDSMNRRIMETASKSQTLCSENVVRNELAHTLSNVILRHSIDEVHHKNMIIDPNDNRHSSEILDTLMESTNQLLLDVICFTFKKMSHIVRLGECPAVLSKETIRRRETEPSCQPSDPGASQAWTKATESSSSSPLSNSHNTSLVINNLVDGMYSKQDKGGVRPGLFKNPTLQSQLSRSHRVPDSSTATTSSKEIYLKGIAGEDTKSPHHSENECRASSEGQRSPTVSQSRSGSQEAEESIHPNTQEKYNCATSRINEVQVNLSLLGDDLLLPAQSTLQTKHPDIYCITDFAEELADTVVSMATEIAAICLDNSSGKQPWFCAWKRGSEFLMTPNVPCRSLKRKKESQGSGTAVRKHKPPRLSEIKRKTDEHPELKEKLMNRVVDESMNLEDVPDSVNLFANEVAAKIMNLTEFSMVDGMWQAQGYPRNRLLSGDRWSRLKASSCESIPEEDSEARAYVNSLGLMSTLSQPVSRASSVSKQSSCESITDEFSRFMVNQMENEGRGFELLLDYYAGKNASSILNSAMQQACRKSDHLSVRPSCPSKQSSTESITEEFYRYMLRDIERDSRESASSRRSSQDWTAGLLSPSLRSPVCHRQSSMPDSRSPCSRLTVNVPIKANSLDGFAQNCPQDFLSVQPVSSASSSGLCKSDSCLYRRGGTDHITNMLIHETWASSIEALMRKNKIIVDDAEEADTEPVSGGSPSQAEKCANRLAASRMCSGPTLLVQESLDCPRKDSVTECKQPPVSSLSKTASLTNHSPLDSKKETSSCQDPVPINHKRRSLCSREVPLIQIETDQREACAGEPEPFLSKSSLLEEAEGHSNDKNIPDVVRGGDTAVSACQIHSDSLDTRDVPEAEASTEARAPDEAPNPPSSSEESTGSWTQLANEEDNPDDTSSFLQLSERSMSELVEEKKILKGQSESTEAPASGPPTGTASPQRSLLVINFDLEPECPDAELRATLQWIAASELGIPTIYFKKSQENRIEKFLDVVQLVHRKSWKVGDIFHAVVQYCKMHEEQKDGRLSLFDWLLELG

SEQ ID NO: 36411 - protein, 436 aa, Homo sapiens
  REGION 1..436: note = ENSP00000349677
MLKVSAVLCVCAAAWCSQSLAAAAAVAAAGGRSDGGNFLDDKQWLTTISQYDKEVGQWNKFRDEVEDDYFRTWSPGKPFDQALDPAKDPCLKMKCSRHKVCIAQDSQTAVCISHRRLTHRMKEAGVDHRQWRGPILSTCKQCPVVYPSPVCGSDGHTYSFQCKLEYQACVLGKQISVKCEGHCPCPSDKPTSTSRNVKRACSDLEFREVANRLRDWFKALHESGSQNKKTKTLLRPERSRFDTSILPICKDSLGWMFNRLDTNYDLLLDQSELRSIYLDKNEQCTKAFFNSCDTYKDSLISNNEWCYCFQRQQDPPCQTELSNIQKRQGVKKLLGQYIPLCDEDGYYKPTQCHGSVGQCWCVDRYGNEVMGSRINGVADCAIDFEISGDFASGDFHEWTDDEDDEDDIMNDEDEIEDDDEDEGDDDDGGDDHDVYI

SEQ ID NO: 36412 - protein, 433 aa, Homo sapiens
  REGION 1..433: note = ENSP00000350153
MLKVSAVLCVCAAAWCSQSLAAAAAVAAAGGRSDGGNFLDDKQWLTTISQYDKEVGQWNKFRDDDYFRTWSPGKPFDQALDPAKDPCLKMKCSRHKVCIAQDSQTAVCISHRRLTHRMKEAGVDHRQWRGPILSTCKQCPVVYPSPVCGSDGHTYSFQCKLEYQACVLGKQISVKCEGHCPCPSDKPTSTSRNVKRACSDLEFREVANRLRDWFKALHESGSQNKKTKTLLRPERSRFDTSILPICKDSLGWMFNRLDTNYDLLLDQSELRSIYLDKNEQCTKAFFNSCDTYKDSLISNNEWCYCFQRQQDPPCQTELSNIQKRQGVKKLLGQYIPLCDEDGYYKPTQCHGSVGQCWCVDRYGNEVMGSRINGVADCAIDFEISGDFASGDFHEWTDDEDDEDDIMNDEDEIEDDDEDEGDDDDGGDDHDVYI

SEQ ID NO: 36413 - protein, 433 aa, Homo sapiens; identical to SEQ ID NO: 36412
  REGION 1..433: note = ENSP00000425570

SEQ ID NO: 36414 - protein, 436 aa, Homo sapiens; identical to SEQ ID NO: 36411
  REGION 1..436: note = ENSP00000423421

SEQ ID NO: 36415 - protein, 436 aa, Homo sapiens; identical to SEQ ID NO: 36411
  REGION 1..436: note = ENSP00000420920

SEQ ID NO: 36416 - protein, 344 aa, Homo sapiens
  REGION 1..344: note = ENSP00000441396
MKCSRHKVCIAQDSQTAVCISHRRLTHRMKEAGVDHRQWRGPILSTCKQCPVVYPSPVCGSDGHTYSFQCKLEYQACVLGKQISVKCEGHCPCPSDKPTSTSRNVKRACSDLEFREVANRLRDWFKALHESGSQNKKTKTLLRPERSRFDTSILPICKDSLGWMFNRLDTNYDLLLDQSELRSIYLDKNEQCTKAFFNSCDTYKDSLISNNEWCYCFQRQQDPPCQTELSNIQKRQGVKKLLGQYIPLCDEDGYYKPTQCHGSVGQCWCVDRYGNEVMGSRINGVADCAIDFEISGDFASGDFHEWTDDEDDEDDIMNDEDEIEDDDEDEGDDDDGGDDHDVYI

SEQ ID NO: 36417 - protein, 393 aa, Homo sapiens
  REGION 1..393: note = ENSP00000426716
MLKVSAVLCVCAAAWCSQSLAAAAAVAAAGGRSDGGNFLDDKQWLTTISQYDKEVGQWNKFRDDDYFRTWSPGKPFDQALDPAKDPCLKMKCSRHKVCIAQDSQTAVCISHRRLTHRMKEAGVDHRQWRGPILSTCKQCPVVYPSPVCGSDGHTYSFQCKLEYQACVLGKQISVKCEGHCPCPSDKPTSTSRNVKRGFDTSILPICKDSLGWMFNRLDTNYDLLLDQSELRSIYLDKNEQCTKAFFNSCDTYKDSLISNNEWCYCFQRQQDPPCQTELSNIQKRQGVKKLLGQYIPLCDEDGYYKPTQCHGSVGQCWCVDRYGNEVMGSRINGVADCAIDFEISGDFASGDFHEWTDDEDDEDDIMNDEDEIEDDDEDEGDDDDGGDDHDVYI

SEQ ID NO: 36418 - protein, 436 aa, Homo sapiens; identical to SEQ ID NO: 36411
  REGION 1..436: note = ENSP00000423606

SEQ ID NO: 36419 - protein, 79 aa, Homo sapiens
  REGION 1..79: note = ENSP00000425712
MLKVSAVLCVCAAAWCSQSLAAAAAVAAAGGRSDGGNFLDDKQWLTTISQYDKEVGQWNKFRDDDYFRTWSPGKPFDQG

SEQ ID NO: 36420 - protein, 338 aa, Homo sapiens
  REGION 1..338: note = ENSP00000426318
MLKVSAVLCVCAAAWCSQSLAAAAAVAAAGGRSDGGNFLDDKQWLTTISQYDKEVGQWNKFRDCKLEYQACVLGKQISVKCEGHCPCPSDKPTSTSRNVKRACSDLEFREVANRLRDWFKALHESGSQNKKTKTLLRPERSRFDTSILPICKDSLGWMFNRLDTNYDLLLDQSELRSIYLDKNEQCTKAFFNSCDTYKDSLISNNEWCYCFQRQQDPPCQTELSNIQKRQGVKKLLGQYIPLCDEDGYYKPTQCHGSVGQCWCVDRYGNEVMGSRINGVADCAIDFEISGDFASGDFHEWTDDEDDEDDIMNDEDEIEDDDEDEGDDDDGGDDHDVYI

SEQ ID NO: 36421 - protein, 433 aa, Homo sapiens; identical to SEQ ID NO: 36412
  REGION 1..433: note = ENSP00000425502

SEQ ID NO: 36422 - protein, 71 aa, Homo sapiens
  REGION 1..71: note = ENSP00000424677
MLKVSAVLCVCAAAWCSQSLAAAAAVAAAGGRSDGGNFLDDKQWLTTISQYDKEVGQWNKFRDDERSRSRP

SEQ ID NO: 36423 - protein, 63 aa, Homo sapiens
  REGION 1..63: note = ENSP00000424980
MLKVSAVLCVCAAAWCSQSLAAAAAVAAAGGRSDGGNFLDDKQWLTTISQYDKEVGQWNKFRD

SEQ ID NO: 36424 - protein, 64 aa, Homo sapiens
  REGION 1..64: note = ENSP00000422170
MLKVSAVLCVCAAAWCSQSLAAAAAVAAAGGRSDGGNFLDDKQWLTTISQYDKEVGQWNKFRDL

SEQ ID NO: 36425 - protein, 313 aa, Homo sapiens
  REGION 1..313: note = ENSP00000426177
MLKVSAVLCVCAAAWCSQSLAAAAAVAAAGGRSDGGNFLDDKQWLTTISQYDKEVGQWNKFRDDDYFRTWSPGKPFDQALDPAKDPCLKMKCSRHKVCIAQDSQTAVCISHRRLTHRMKEAGVDHRQWRGPILSTCKQCPVVYPSPVCGSDGHTYSFQCKLEYQACVLGKQISVKCEGHCPCPSDKPTSTSRNVKRACSDLEFREVANRLRDWFKALHESGSQNKKTKTLLRPERSRFDTSILPICKDSLGWMFNRLDTNYDLLLDQSELRSIYLDKNEQCTKAFFNSCDTYKDSLISNNEWCYCFQRQQGKR

SEQ ID NO: 36426 - protein, 172 aa, Homo sapiens
  REGION 1..172: note = ENSP00000423176
MLKVSAVLCVCAAAWCSQSLAAAAAVAAAGGRSDGGNFLDDKQWLTTISQYDKEVGQWNKFRDDDYFRTWSPGKPFDQACSDLEFREVANRLRDWFKALHESGSQNKKTKTLLRPERSRFDTSILPICKDSLGWMFNRLDTNYDLLLDQSELRSIYLDKNEQCTKAFFNSCD

SEQ ID NO: 36427 - protein, 83 aa, Homo sapiens
  REGION 1..83: note = ENSP00000425859
NFLDDKQWLTTISQYDKEVGQWNKFRDDDYFRTWSPGKPFDQALDPAKDPCLKMKCSRHKVCIAQDSQTAVCISHRRLTHSAN

SEQ ID NO: 36428 - protein, 79 aa, Homo sapiens; identical to SEQ ID NO: 36419
  REGION 1..79: note = ENSP00000424674

SEQ ID NO: 36429 - protein, 122 aa, Homo sapiens
  REGION 1..122: note = ENSP00000420928
MLKVSAVLCVCAAAWCSQSLAAAAAVAAAGGRSDGGNFLDDKQWLTTISQYDKEVGQWNKFRDEVEDDYFRTWSPGKPFDQALDPAKDPCLKMKCSRHKVCIAQDSQTAVCISHRRLTHSAN

SEQ ID NO: 36430 - protein, 122 aa, Homo sapiens; identical to SEQ ID NO: 36429
  REGION 1..122: note = ENSP00000422336

SEQ ID NO: 36431 - protein, 161 aa, Homo sapiens
  REGION 1..161: note = ENSP00000423367
MLKVSAVLCVCAAAWCSQSLAAAAAVAAAGGRSDGGNFLDDKQWLTTISQYDKEVGQWNKFRDDDYFRTWSPGKPFDQALDPAKDPCLKMKCSRHKVCIAQDSQTAVCISHRRLTHRMKEAGVDHRQWRGPILSTCKQCPVVYPSPVCGSDGHTYSFQCKL

SEQ ID NO: 36432 - protein, 89 aa, Homo sapiens
  REGION 1..89: note = ENSP00000426995
MLKVSAVLCVCAAAWCSQSLAAAAAVAAAGGRSDGGNFLDDKQWLTTISQYDKEVGQWNKFRDDDYFRTWSPGKPFDQALSFHDLGIFV

SEQ ID NO: 36433 - protein, 115 aa, Homo sapiens
  REGION 1..115: note = ENSP00000424168
MLKVSAVLCVCAAAWCSQSLAAAAAVAAAGGRSDGGNFLDDKQWLTTISQYDKEVGQWNKFRDEVEDDYFRTWSPGKPFDQALDPAKDPCLKMKCSRHKVCIAQDSQTAVCISHR

SEQ ID NO: 36434 - protein, 115 aa, Homo sapiens; identical to SEQ ID NO: 36433
  REGION 1..115: note = ENSP00000425407

SEQ ID NO: 36435 - protein, 385 aa, Homo sapiens
  REGION 1..385: note = ENSP00000411344
MITQDHIHMSSGLSQDDYFRTWSPGKPFDQALDPAKDPCLKMKCSRHKVCIAQDSQTAVCISHRRLTHRMKEAGVDHRQWRGPILSTCKQCPVVYPSPVCGSDGHTYSFQCKLEYQACVLGKQISVKCEGHCPCPSDKPTSTSRNVKRACSDLEFREVANRLRDWFKALHESGSQNKKTKTLLRPERSRFDTSILPICKDSLGWMFNRLDTNYDLLLDQSELRSIYLDKNEQCTKAFFNSCDTYKDSLISNNEWCYCFQRQQDPPCQTELSNIQKRQGVKKLLGQYIPLCDEDGYYKPTQCHGSVGQCWCVDRYGNEVMGSRINGVADCAIDFEISGDFASGDFHEWTDDEDDEDDIMNDEDEIEDDDEDEGDDDDGGDDHDVYI

SEQ ID NO: 36436 - protein, 316 aa, Homo sapiens
  REGION 1..316: note = ENSP00000444789
MKEAGVDHRQWRGPILSTCKQCPVVYPSPVCGSDGHTYSFQCKLEYQACVLGKQISVKCEGHCPCPSDKPTSTSRNVKRACSDLEFREVANRLRDWFKALHESGSQNKKTKTLLRPERSRFDTSILPICKDSLGWMFNRLDTNYDLLLDQSELRSIYLDKNEQCTKAFFNSCDTYKDSLISNNEWCYCFQRQQDPPCQTELSNIQKRQGVKKLLGQYIPLCDEDGYYKPTQCHGSVGQCWCVDRYGNEVMGSRINGVADCAIDFEISGDFASGDFHEWTDDEDDEDDIMNDEDEIEDDDEDEGDDDDGGDDHDVYI

SEQ ID NO: 36437 - protein, 807 aa, Homo sapiens
  REGION 1..807: note = ENSP00000460236
MRLSPAPLKLSRTPALLALALPLAAALAFSDETLDKVPKSEGYCSRILRAQGTRREGYTEFSLRVEGDPDFYKPGTSYRVTLSAAPPSYFRGFTLIALRENREGDKEEDHAGTFQIIDEEETQFMSNCPVAVTESTPRRRTRIQVFWIAPPAGTGCVILKASIVQKRIIYFQDEGSLTKKLCEQDSTFDGVTDKPILDCCACGTAKYRLTFYGNWSEKTHPKDYPRRANHWSAIIGGSHSKNYVLWEYGGYASEGVKQVAELGSPVKMEEEIRQQSDEVLTVIKAKAQWPAWQPLNVRAAPSAEFSVDRTRHLMSFLTMMGPSPDWNVGLSAEDLCTKECGWVQKVVQDLIPWDAGTDSGVTYESPNKPTIPQEKIRPLTSLDHPQSPFYDPEGGSITQVARVVIERIARKGEQCNIVPDNVDDIVADLAPEEKDEDDTPETCIYSNWSPWSACSSSTCDKGKRMRQRMLKAQLDLSVPCPDTQDFQPCMGPGCSDEDGSTCTMSEWITWSPCSISCGMGMRSRERYVKQFPEDGSVCTLPTEETEKCTVNEECSPSSCLMTEWGEWDECSATCGMGMKKRHRMIKMNPADGSMCKAETSQAEKCMMPECHTIPCLLSPWSEWSDCSVTCGKGMRTRQRMLKSLAELGDCNEDLEQVEKCMLPECPIDCELTEWSQWSECNKSCGKGHVIRTRMIQMEPQFGGAPCPETVQRKKCRIRKCLRNPSIQKLRWREARESRRSEQLKEESEGEQFPGCRMRPWTAWSECTKLCGGGIQERYMTVKKRFKSSQFTSCKDKKEIRACNVHPC

SEQ ID NO: 36438 - protein, 331 aa, Homo sapiens
  REGION 1..331: note = ENSP00000290902
MENPSPAAALGKALCALLLATLGAAGQPLGGESICSARALAKYSITFTGKWSQTAFPKQYPLFRPPAQWSSLLGAAHSSDYSMWRKNQYVSNGLRDFAERGEAWALMKEIEAAGEALQSVHAVFSAPAVPSGTGQTSAELEVQRRHSLVSFVVRIVPSPDWFVGVDSLDLCDGDRWREQAALDLYPYDAGTDSGFTFSSPNFATIPQDTVTEITSSSPSHPANSFYYPRLKALPPIARVTLVRLRQSPRAFIPPAPVLPSRDNEIVDSASVPETPLDCEVSLWSSWGLCGGHCGRLGTKSRTRYVRVQPANNGSPCPELEEEAECVPDNCV

SEQ ID NO: 36439 - protein, 108 aa, Homo sapiens
  REGION 1..108: note = ENSP00000424542
MENPSPAAALGKALCALLLATLGAAGQPLGGESICSARALAKYSITFTGKWSQTAFPKQYPLFRPPAQWSSLLGAAHSSDYSMWRKNQYVSNGLRDFAERGEAWALMK

SEQ ID NO: 36440 - protein, 64 aa, Homo sapiens
  REGION 1..64: note = ENSP00000425871
MENPSPAAALGKALCALLLATLGAAGQPLGGESICSARALAKYSITFTGKWSQTAFPKQYPLFR

SEQ ID NO: 36441 - protein, 61 aa, Homo sapiens
  REGION 1..61: note = ENSP00000422516
MENPSPAAALGKALCALLLATLGAAGQPLGGESICSARALAKYSITFTGKWSQTAFPKQYP

SEQ ID NO: 36442 - protein, 24 aa, Homo sapiens
  REGION 1..24: note = ENSP00000421634
MENPSPAAALGKALCALLLATLGA

SEQ ID NO: 36443 - protein, 16 aa, Homo sapiens
  REGION 1..16: note = ENSP00000421379
MENPSPAAALGKALCA

SEQ ID NO: 36444 - protein, 15 aa, Homo sapiens
  REGION 1..15: note = ENSP00000423414
MENPSPAAALGKALC

SEQ ID NO: 36445 - protein, 7 aa, Homo sapiens
  REGION 1..7: note = ENSP00000421858
MENPSPA

SEQ ID NO: 36446 - protein, 331 aa, Homo sapiens; identical to SEQ ID NO: 36438
  REGION 1..331: note = ENSP00000483599

SEQ ID NO: 36447 - protein, 331 aa, Homo sapiens; identical to SEQ ID NO: 36438
  REGION 1..331: note = ENSP00000394832

SEQ ID NO: 36448 - protein, 300 aa, Homo sapiens
  REGION 1..300: note = ENSP00000237623
MRIAVICFCLLGITCAIPVKQADSGSSEEKQLYNKYPDAVATWLNPDPSQKQNLLAPQTLPSKSNESHDHMDDMDDEDDDDHVDSQDSIDSNDSDDVDDTDDSHQSDESHHSDESDELVTDFPTDLPATEVFTPVVPTVDTYDGRGDSVVYGLRSKSKKFRRPDIQYPDATDEDITSHMESEELNGAYKAIPVAQDLNAPSDWDSRGKDSYETSQLDDQSAETHSHKQSRLYKRKANDESNEHSDVIDSQELSKVSREFHSHEFHSHEDMLVVDPKSKEEDKHLKFRISHELDSASSEVN

SEQ ID NO: 36449 - protein, 314 aa, Homo sapiens
  REGION 1..314: note = ENSP00000378517
MRIAVICFCLLGITCAIPVKQADSGSSEEKQLYNKYPDAVATWLNPDPSQKQNLLAPQNAVSSEETNDFKQETLPSKSNESHDHMDDMDDEDDDDHVDSQDSIDSNDSDDVDDTDDSHQSDESHHSDESDELVTDFPTDLPATEVFTPVVPTVDTYDGRGDSVVYGLRSKSKKFRRPDIQYPDATDEDITSHMESEELNGAYKAIPVAQDLNAPSDWDSRGKDSYETSQLDDQSAETHSHKQSRLYKRKANDESNEHSDVIDSQELSKVSREFHSHEFHSHEDMLVVDPKSKEEDKHLKFRISHELDSASSEVN

SEQ ID NO: 36450 - protein, 241 aa, Homo sapiens
  REGION 1..241: note = ENSP00000422973
MRIAVICFCLLGITCAIPVKQADSGSSEEKQTLPSKSNESHDHMDDMDDEDDDDHVDSQDSIDSNDSDDVDDTDDSHQSDESHHSDESDELVTDFPTDLPATEVFTPVVPTVDTYDGRGDSVVYGLRSKSKKFRRPDIQYPDATDEDITSHMESEELNGAYKAIPVAQDLNAPSDWDSRGKDSYETSQLDDQSAETHSHKQSRLYKRKANDESNEHSDVIDSQELSKVSREFHSHEFHSHE

SEQ ID NO: 36451 - protein, 287 aa, Homo sapiens
  REGION 1..287: note = ENSP00000354042
MRIAVICFCLLGITCAIPVKQADSGSSEEKQNAVSSEETNDFKQETLPSKSNESHDHMDDMDDEDDDDHVDSQDSIDSNDSDDVDDTDDSHQSDESHHSDESDELVTDFPTDLPATEVFTPVVPTVDTYDGRGDSVVYGLRSKSKKFRRPDIQYPDATDEDITSHMESEELNGAYKAIPVAQDLNAPSDWDSRGKDSYETSQLDDQSAETHSHKQSRLYKRKANDESNEHSDVIDSQELSKVSREFHSHEFHSHEDMLVVDPKSKEEDKHLKFRISHELDSASSEVN

SEQ ID NO: 36452 - protein, 292 aa, Homo sapiens
  REGION 1..292: note = ENSP00000477824
MRIAVICFCLLGITCAIPVKQADSGSSEEKQLYNKYPDAVATWLNPDPSQKQNLLAPQNAVSSEETNDFKQETLPSKSNESHDHMDDMDDEDDDSHQSDESHHSDESDELVTDFPTDLPATEVFTPVVPTVDTYDGRGDSVVYGLRSKSKKFRRPDIQYPDATDEDITSHMESEELNGAYKAIPVAQDLNAPSDWDSRGKDSYETSQLDDQSAETHSHKQSRLYKRKANDESNEHSDVIDSQELSKVSREFHSHEFHSHEDMLVVDPKSKEEDKHLKFRISHELDSASSEVN

SEQ ID NO: 36453 - protein, 454 aa, Homo sapiens
  REGION 1..454: note = ENSP00000467540
MAQMGGKVGDPLWILRKWGLGGCSLELVPGSRTQQASKPASLLPLPQAAPSPPTRLPGSPSLPPRPGSRCPSPAPPEPAREPERKGGGGGRVAAARSPAGASQTTLECTLKPGLVYNKVNPIFHHWSLGDCKFGLTFQSPAEADEFQKSLLAALAALGRGSLTPSSSSSSSSPSQDTAETPCPLTSHVDSDSSSSHSRQETPPSAAAAPIITMESASGFGPTTPPQRRRSSAQSYPPLLPFTGIPEPSEPLAGAGGLGWGGRGYEDYRRSGPPAPLALSTCVVRFAKTGALRGAALGPPAALPAPLTEAAPPAPPARPPPGPGPSSAPAKASPEAEEAARCVHCRALFRRRADGRGGRCAEAPDPGRLLVRRLSCLWCAESLLYHCLSDAEGDFSDPCACEPGHPRPAARWAALAALSLAVPCLCCYAPLRACHWVAARCGCAGCGGRHEEAAR

SEQ ID NO: 36454 - protein, 410 aa, Homo sapiens
  REGION 1..410: note = ENSP00000466568
MVRVRAVVMARDDSSGGWLPVGGGGLSQVSVCRVRGARPEGGARQGHYVIHGERLRDQKTTLECTLKPGLVYNKVNPIFHHWSLGDCKFGLTFQSPAEADEFQKSLLAALAALGRGSLTPSSSSSSSSPSQDTAETPCPLTSHVDSDSSSSHSRQETPPSAAAAPIITMESASGFGPTTPPQRRRSSAQSYPPLLPFTGIPEPSEPLAGAGGLGWGGRGYEDYRRSGPPAPLALSTCVVRFAKTGALRGAALGPPAALPAPLTEAAPPAPPARPPPGPGPSSAPAKASPEAEEAARCVHCRALFRRRADGRGGRCAEAPDPGRLLVRRLSCLWCAESLLYHCLSDAEGDFSDPCACEPGHPRPAARWAALAALSLAVPCLCCYAPLRACHWVAARCGCAGCGGRHEEAAR

SEQ ID NO: 36455 - protein, 181 aa, Homo sapiens
  REGION 1..181: note = ENSP00000467532
MVRVRAVVMARDDSSGGWLPVGGGGLSQVSVCRVRGARPEGGARQGHYVIHGERLRDQKTTLECTLKPGLVYNKVNPIFHHWSLGDCKFGLTFQSPAEADEFQKSLLAALAALGRGSLTPSSSSSSSSPSQDTAETPCPLTSHVDSDSSSSHSRQETPPSAAAAPIITMESASGFGPTTPP

SEQ ID NO: 36456 - protein, 410 aa, Homo sapiens; identical to SEQ ID NO: 36454
  REGION 1..410: note = ENSP00000345405

SEQ ID NO: 36457 - protein, 121 aa, Homo sapiens
  REGION 1..121: note = ENSP00000465713
MVRVRAVVMARDDSSGGWLPVGGGGLSQTTLECTLKPGLVYNKVNPIFHHWSLGDCKFGLTFQSPAEADEFQKSLLAALAALGRGSLTPSSSSSSSSPSQDTAETPCPLTLSQYFRHMLCP

SEQ ID NO: 36458 - protein, 273 aa, Homo sapiens
  REGION 1..273: note = ENSP00000311609
MGQKLSGSLKSVEVREPALRPAKRELRGAEPGRPARLDQLLDMPAAGLAVQLRHAWNPEDRSLNVFVKDDDRLTFHRHPVAQSTDGIRGKVGHARGLHAWQINWPARQRGTHAVVGVATARAPLHSVGYTALVGSDAESWGWDLGRSRLYHDGKNQPGVAYPAFLGPDEAFALPDSLLVVLDMDEGTLSFIVDGQYLGVAFRGLKGKKLYPVVSAVWGHCEVTMRYINGLDPEPLPLMDLCRRSIRSALGRQRLQDISSLPLPQSLKNYLQYQ

SEQ ID NO: 36459 - protein, 90 aa, Homo sapiens
  REGION 1..90: note = ENSP00000422034
  VARIANT 1: note = Any amino acid
XVVLDMDEGTLSFIVDGQYLGVAFRGLKGKKLYPVVSAVWGHCEVTMRYINGLDHGVSLGCPGQSAVARSRLTATSASRVQAILLPQLPE

SEQ ID NO: 36460 - protein, 2328 aa, Homo sapiens
  REGION 1..2328: note = ENSP00000451752
MTSATEFENVGNQPPYSRINARWDAPDDELDNDNSSARLFERSRIKALADEREVVQKKTFTKWVNSHLARVSCRITDLYKDLRDGRMLIKLLEVLSGEMLPKPTKGKMRIHCLENVDKALQFLKEQRVHLENMGSHDIVDGNHRLVLGLIWTIILRFQIQDIVVQTQEGRETRSAKDALLLWCQMKTAGYPHVNVTNFTSSWKDGLAFNALIHKHRPDLIDFDKLKDSNARHNLEHAFNVAERQLGIIPLLDPEDVFTENPDEKSIITYVVAFYHYFSKMKVLAVEGKRVGKVIDHAIETEKMIEKYSGLASDLLTWIEQTITVLNSRKFANSLTGVQQQLQAFSTYRTVEKPPKFQEKGNLEVLLFTIQSRMRANNQKVYTPHDGKLVSDINRAWESLEEAEYRRELALRNELIRQEKLEQLARRFDRKAAMRETWLSENQRLVAQDNFGYDLAAVEAAKKKHEAIETDTAAYEERVRALEDLAQELEKENYHDQKRITARKDNILRLWSYLQELLQSRRQRLETTLALQKLFQDMLHSIDWMDEIKAHLLSAEFGKHLLEVEDLLQKHKLMEADIAIQGDKVKAITAATLKFTEGKGYQPCDPQVIQDRISHLEQCFEELSNMAAGRKAQLEQSKRLWKFFWEMDEAESWIKEKEQIYSSLDYGKDLTSVLILQRKHKAFEDELRGLDAHLEQIFQEAHGMVARKQFGHPQIEARIKEVSAQWDQLKDLAAFCKKNLQDAENFFQFQGDADDLKAWLQDAHRLLSGEDVGQDEGATRALGKKHKDFLEELEESRGVMEHLEQQAQGFPEEFRDSPDVTHRLQALRELYQQVVAQADLRQQRLQEALDLYTVFGETDACELWMGEKEKWLAEMEMPDTLEDLEVVQHRFDILDQEMKTLMTQIDGVNLAANSLVESGHPRSREVKQYQDHLNTRWQAFQTLVSERREAVDSALRVHNYCVDCEETSKWITDKTKVVESTKDLGRDLAGIIAIQRKLSGLERDVAAIQARVDALERESQQLMDSHPEQKEDIGQRQKHLEELWQGLQQSLQGQEDLLGEVSQLQAFLQDLDDFQAWLSITQKAVASEDMPESLPEAEQLLQQHAGIKDEIDGHQDSYQRVKESGEKVIQGQTDPEYLLLGQRLEGLDTGWNALGRMWESRSHTLAQCLGFQEFQKDAKQAEAILSNQEYTLAHLEPPDSLEAAEAGIRKFEDFLGSMENNRDKVLSPVDSGNKLVAEGNLYSDKIKEKVQLIEDRHRKNNEKAQEASVLLRDNLELQNFLQNCQELTLWINDKLLTSQDVSYDEARNLHNKWLKHQAFVAELASHEGWLENIDAEGKQLMDEKPQFTALVSQKLEALHRLWDELQATTKEKTQHLSAARSSDLRLQTHADLNKWISAMEDQLRSDDPGKDLTSVNRMLAKLKRVEDQVNVRKEELGELFAQVPSMGEEGGDADLSIEKRFLDLLEPLGRRKKQLESSRAKLQISRDLEDETLWVEERLPLAQSADYGTNLQTVQLFMKKNQTLQNEILGHTPRVEDVLQRGQQLVEAAEIDCQDLEERLGHLQSSWDRLREAAAGRLQRLRDANEAQQYYLDADEAEAWIGEQELYVISDEIPKDEEGAIVMLKRHLRQQRAVEDYGRNIKQLASRAQGLLSAGHPEGEQIIRLQGQVDKHYAGLKDVAEERKRKLENMYHLFQLKRETDDLEQWISEKELVASSPEMGQDFDHVTLLRDKFRDFARETGAIGQERVDNVNAFIERLIDAGHSEAATIAEWKDGLNEMWADLLELIDTRMQLLAASYDLHRYFYTGAEILGLIDEKHRELPEDVGLDASTAESFHRVHTAFERELHLLGVQVQQFQDVATRLQTAYAGEKAEAIQNKEQEVSAAWQALLDACAGRRTQLVDTADKFRFFSMARDLLSWMESIIRQIETQERPRDVSSVELLMKYHQGINAEIETRSKNFSACLELGESLLQRQHQASEEIREKLQQVMSRRKEMNEKWEARWERLRMLLEVCQFSRDASVAEAWLIAQEPYLASGDFGHTVDSVEKLIKRHEAFEKSTASWAERFAALEKPTTLELKERQIAERPAEETGPQEEEGETAGEAPVSHHAATERTSPGEEEGTWPQNLQQPPPPGQHKDGQKSTGDERPTTEPLFKVLDTPLSEGDEPATLPAPRDHGQSVQMEGYLGRKHDLEGPNKKASNRSWNNLYCVLRNSELTFYKDAKNLALGMPYHGEEPLALRHAICEIAANYKKKKHVFKLRLSNGSEWLFHGKDEEEMLSWLQGVSTAINESQSIRVKAQSLPLPSLSGPDASLGKKDKEKRFSFFPKKK

SEQ ID NO: 36461 - protein, 1028 aa, Homo sapiens
  REGION 1..1028: note = ENSP00000451324
GKQLMDEKPQFTALVSQKLEALHRLWDELQATTKEKTQHLSAARSSDLRLQTHADLNKWISAMEDQLRSDDPGKDLTSVNRMLAKLKRVEDQVNVRKEELGELFAQVPSMGEEGGDADLSIEKRFLDLLEPLGRRKKQLESSRAKLQISRDLEDETLWVEERLPLAQSADYGTNLQTVQLFMKKNQTLQNEILGHTPRVEDVLQRGQQLVEAAEIDCQDLEERLGHLQSSWDRLREAAAGRLQRLRDANEAQQYYLDADEAEAWIGEQELYVISDEIPKDEEGAIVMLKRHLRQQRAVEDYGRNIKQLASRAQGLLSAGHPEGEQIIRLQGQVDKHYAGLKDVAEERKRKLENMYHLFQLKRETDDLEQWISEKELVASSPEMGQDFDHVTLLRDKFRDFARETGAIGQERVDNVNAFIERLIDAGHSEAATIAEWKDGLNEMWADLLELIDTRMQLLAASYDLHRYFYTGAEILGLIDEKHRELPEDVGLDASTAESFHRVHTAFERELHLLGVQVQQFQDVATRLQTAYAGEKAEAIQNKEQEVSAAWQALLDACAGRRTQLVDTADKFRFFSMARDLLSWMESIIRQIETQERPRDVSSVELLMKYHQGINAEIETRSKNFSACLELGESLLQRQHQASEEIREKLQQVMSRRKEMNEKWEARWERLRMLLEVCQFSRDASVAEAWLIAQEPYLASGDFGHTVDSVEKLIKRHEAFEKSTASWAERFAALEKPTTLELKERQIAERPAEETGPQEEEGETAGEAPVSHHAATERTSPGEEEGTWPQNLQQPPPPGQHKDGQKSTGDERPTTEPLFKVLDTPLSEGDEPATLPAPRDHGQSVQMEGYLGRKHDLEGPNKKASNSKGEEGEERRETEEEDEEEEETESVAVEMQQHASHVSWNNLYCVLRNSELTFYKDAKNLALGMPYHGEEPLALRHAICEIAANYKKKKHVFKLRLSNGSEWLFHGKDEEEMLSWLQGVSTAINESQSIRVKAQSLPLPSLSGPDASLGKKDKEKRFSFFPKKK

SEQ ID NO: 36462 - protein, 2137 aa, Homo sapiens
  REGION 1..2137: note = ENSP00000374371
MTSATEFENVGNQPPYSRINARWDAPDDELDNDNSSARLFERSRIKALADEREVVQKKTFTKWVNSHLARVSCRITDLYKDLRDGRMLIKLLEVLSGEMLPKPTKGKMRIHCLENVDKALQFLKEQRVHLENMGSHDIVDGNHRLVLGLIWTIILRFQIQDIVVQTQEGRETRSAKDALLLWCQMKTAGYPHVNVTNFTSSWKDGLAFNALIHKHRPDLIDFDKLKDSNARHNLEHAFNVAERQLGIIPLLDPEDVFTENPDEKSIITYVVAFYHYFSKMKVLAVEGKRVGKVIDHAIETEKMIEKYSGLASDLLTWIEQTITVLNSRKFANSLTGVQQQLQAFSTYRTVEKPPKFQEKGNLEVLLFTIQSRMRANNQKVYTPHDGKLVSDINRAWESLEEAEYRRELALRNELIRQEKLEQLARRFDRKAAMRETWLSENQRLVAQDNFGYDLAAVEAAKKKHEAIETDTAAYEERVRALEDLAQELEKENYHDQKRITARKDNILRLWSYLQELLQSRRQRLETTLALQKLFQDMLHSIDWMDEIKAHLLSAEFGKHLLEVEDLLQKHKLMEADIAIQGDKVKAITAATLKFTEGKGYQPCDPQVIQDRISHLEQCFEELSNMAAGRKAQLEQSKRLWKFFWEMDEAESWIKEKEQIYSSLDYGKDLTSVLILQRKHKAFEDELRGLDAHLEQIFQEAHGMVARKQFGHPQIEARIKEVSAQWDQLKDLAAFCKKNLQDAENFFQFQGDADDLKAWLQDAHRLLSGEDVGQDEGATRALGKKHKDFLEELEESRGVMEHLEQQAQGFPEEFRDSPDVTHRLQALRELYQQVVAQADLRQQRLQEALDLYTVFGETDACELWMGEKEKWLAEMEMPDTLEDLEVVQHRFDILDQEMKTLMTQIDGVNLAANSLVESGHPRSREVKQYQDHLNTRWQAFQTLVSERREAVDSALRVHNYCVDCEETSKWITDKTKVVESTKDLGRDLAGIIAIQRKLSGLERDVAAIQARVDALERESQQLMDSHPEQKEDIGQRQKHLEELWQGLQQSLQGQEDLLGEVSQLQAFLQDLDDFQAWLSITQKAVASEDMPESLPEAEQLLQQHAGIKDEIDGHQDSYQRVKESGEKVIQGQTDPEYLLLGQRLEGLDTGWNALGRMWESRSHTLAQCLGFQEFQKDAKQAEAILSNQEYTLAHLEPPDSLEAAEAGIRKFEDFLGSMENNRDKVLSPVDSGNKLVAEGNLYSDKIKEKVQLIEDRHRKNNEKAQEASVLLRDNLELQNFLQNCQELTLWINDKLLTSQDVSYDEARNLHNKWLKHQAFVAELASHEGWLENIDAEGKQLMDEKPQFTALVSQKLEALHRLWDELQATTKEKTQHLSAARSSDLRLQTHADLNKWISAMEDQLRSDDPGKDLTSVNRMLAKLKRVEDQVNVRKEELGELFAQVPSMGEEGGDADLSIEKRFLDLLEPLGRRKKQLESSRAKLQISRDLEDETLWVEERLPLAQSADYGTNLQTVQLFMKKNQTLQNEILGHTPRVEDVLQRGQQLVEAAEIDCQDLEERLGHLQSSWDRLREAAAGRLQRLRDANEAQQYYLDADEAEAWIGEQELYVISDEIPKDEEGAIVMLKRHLRQQRAVEDYGRNIKQLASRAQGLLSAGHPEGEQIIRLQGQVDKHYAGLKDVAEERKRKLENMYHLFQLKRETDDLEQWISEKELVASSPEMGQDFDHVTLLRDKFRDFARETGAIGQERVDNVNAFIERLIDAGHSEAATIAEWKDGLNEMWADLLELIDTRMQLLAASYDLHRYFYTGAEILGLIDEKHRELPEDVGLDASTAESFHRVHTAFERELHLLGVQVQQFQDVATRLQTAYAGEKAEAIQNKEQEVSAAWQALLDACAGRRTQLVDTADKFRFFSMARDLLSWMESIIRQIETQERPRDVSSVELLMKYHQGINAEIETRSKNFSACLELGESLLQRQHQASEEIREKLQQVMSRRKEMNEKWEARWERLRMLLEVCQFSRDASVAEAWLIAQEPYLASGDFGHTVDSVEKLIKRHEAFEKSTASWAERFAALEKPTTLELKERQIAERPAEETGPQEEEGETAGEAPVSHHAATERTSPVSLWSRLSSSWESLQPEPSHPY

SEQ ID NO: 36463 - protein, 2106 aa, Homo sapiens
  REGION 1..2106: note = ENSP00000374370
MTSATEFENVGNQPPYSRINARWDAPDDELDNDNSSARLFERSRIKALADEREVVQKKTFTKWVNSHLARVSCRITDLYKDLRDGRMLIKLLEVLSGEMLPKPTKGKMRIHCLENVDKALQFLKEQRVHLENMGSHDIVDGNHRLVLGLIWTIILRFQIQDIVVQTQEGRETRSAKDALLLWCQMKTAGYPHVNVTNFTSSWKDGLAFNALIHKHRPDLIDFDKLKDSNARHNLEHAFNVAERQLGIIPLLDPEDVFTENPDEKSIITYVVAFYHYFSKMKVLAVEGKRVGKVIDHAIETEKMIEKYSGLASDLLTWIEQTITVLNSRKFANSLTGVQQQLQAFSTYRTVEKPPKFQEKGNLEVLLFTIQSRMRANNQKVYTPHDGKLVSDINRAWESLEEAEYRRELALRNELIRQEKLEQLARRFDRKAAMRETWLSENQRLVAQDNFGYDLAAVEAAKKKHEAIETDTAAYEERVRALEDLAQELEKENYHDQKRITARKDNILRLWSYLQELLQSRRQRLETTLALQKLFQDMLHSIDWMDEIKAHLLSAEFGKHLLEVEDLLQKHKLMEADIAIQGDKVKAITAATLKFTEGKGYQPCDPQVIQDRISHLEQCFEELSNMAAGRKAQLEQSKRLWKFFWEMDEAESWIKEKEQIYSSLDYGKDLTSVLILQRKHKAFEDELRGLDAHLEQIFQEAHGMVARKQFGHPQIEARIKEVSAQWDQLKDLAAFCKKNLQDAENFFQFQGDADDLKAWLQDAHRLLSGEDVGQDEGATRALGKKHKDFLEELEESRGVMEHLEQQAQGFPEEFRDSPDVTHRLQALRELYQQVVAQADLRQQRLQEALDLYTVFGETDACELWMGEKEKWLAEMEMPDTLEDLEVVQHRFDILDQEMKTLMTQIDGVNLAANSLVESGHPRSREVKQYQDHLNTRWQAFQTLVSERREAVDSALRVHNYCVDCEETSKWITDKTKVVESTKDLGRDLAGIIAIQRKLSGLERDVAAIQARVDALERESQQLMDSHPEQKEDIGQRQKHLEELWQGLQQSLQGQEDLLGEVSQLQAFLQDLDDFQAWLSITQKAVASEDMPESLPEAEQLLQQHAGIKDEIDGHQDSYQRVKESGEKVIQGQTDPEYLLLGQRLEGLDTGWNALGRMWESRSHTLAQCLGFQEFQKDAKQAEAILSNQEYTLAHLEPPDSLEAAEAGIRKFEDFLGSMENNRDKVLSPVDSGNKLVAEGNLYSDKIKEKVQLIEDRHRKNNEKAQEASVLLRDNLELQNFLQNCQELTLWINDKLLTSQDVSYDEARNLHNKWLKHQAFVAELASHEGWLENIDAEGKQLMDEKPQFTALVSQKLEALHRLWDELQATTKEKTQHLSAARSSDLRLQTHADLNKWISAMEDQLRSDDPGKDLTSVNRMLAKLKRVEDQVNVRKEELGELFAQVPSMGEEGGDADLSIEKRFLDLLEPLGRRKKQLESSRAKLQISRDLEDETLWVEERLPLAQSADYGTNLQTVQLFMKKNQTLQNEILGHTPRVEDVLQRGQQLVEAAEIDCQDLEERLGHLQSSWDRLREAAAGRLQRLRDANEAQQYYLDADEAEAWIGEQELYVISDEIPKDEEGAIVMLKRHLRQQRAVEDYGRNIKQLASRAQGLLSAGHPEGEQIIRLQGQVDKHYAGLKDVAEERKRKLENMYHLFQLKRETDDLEQWISEKELVASSPEMGQDFDHVTLLRDKFRDFARETGAIGQERVDNVNAFIERLIDAGHSEAATIAEWKDGLNEMWADLLELIDTRMQLLAASYDLHRYFYTGAEILGLIDEKHRELPEDVGLDASTAESFHRVHTAFERELHLLGVQVQQFQDVATRLQTAYAGEKAEAIQNKEQEVSAAWQALLDACAGRRTQLVDTADKFRFFSMARDLLSWMESIIRQIETQERPRDVSSVELLMKYHQGINAEIETRSKNFSACLELGESLLQRQHQASEEIREKLQQVMSRRKEMNEKWEARWERLRMLLEVCQFSRDASVAEAWLIAQEPYLASGDFGHTVDSVEKLIKRHEAFEKSTASWAERFAALEKPTTASRGGRRDSRGGSSFPPCGHRENVPGQSLVSFV

SEQ ID NO: 36464 - protein, 2328 aa, Homo sapiens; identical to SEQ ID NO: 36460
  REGION 1..2328: note = ENSP00000374372

SEQ ID NO: 36465 - protein, 2390 aa, Homo sapiens
  REGION 1..2390: note = ENSP00000432568
MSSTLSPTDFDSLEIQGQYSDINNRWDLPDSDWDNDSSSARLFERSRIKALADEREAVQKKTFTKWVNSHLARVTCRVGDLYSDLRDGRNLLRLLEVLSGEILPKPTKGRMRIHCLENVDKALQFLKEQKVHLENMGSHDIVDGNHRLTLGLVWTIILRFQIQDISVETEDNKEKKSAKDALLLWCQMKTAGYPNVNVHNFTTSWRDGLAFNAIVHKHRPDLLDFESLKKCNAHYNLQNAFNLAEKELGLTKLLDPEDVNVDQPDEKSIITYVATYYHYFSKMKALAVEGKRIGKVLDHAMEAERLVEKYESLASELLQWIEQTIVTLNDRQLANSLSGVQNQLQSFNSYRTVEKPPKFTEKGNLEVLLFTIQSKLRANNQKVYTPREGRLISDINKAWERLEKAEHERELALRTELIRQEKLEQLAARFDRKAAMRETWLSENQRLVSQDNFGLELAAVEAAVRKHEAIETDIVAYSGRVQAVDAVAAELAAERYHDIKRIAARQHNVARLWDFLRQMVAARRERLLLNLELQKVFQDLLYLMDWMEEMKGRLQSQDLGRHLAGVEDLLQLHELVEADIAVQAERVRAVSASALRFCNPGKEYRPCDPQLVSERVAKLEQSYEALCELAAARRARLEESRRLWRFLWEVGEAEAWVREQQHLLASADTGRDLTGALRLLNKHTALRGEMSGRLGPLKLTLEQGQQLVAEGHPGASQASARAAELQAQWERLEALAEERAQRLAQAASLYQFQADANDMEAWLVDALRLVSSPELGHDEFSTQALARQHRALEEEIRSHRPTLDALREQAAALPPTLSRTPEVQSRVPTLERHYEELQARAGERARALEAALALYTMLSEAGACGLWVEEKEQWLNGLALPERLEDLEVVQQRFETLEPEMNTLAAQITAVNDIAEQLLKANPPGKDRIVNTQEQLNHRWQQFRRLADGKKAALTSALSIQNYHLECTETQAWMREKTKVIESTQGLGNDLAGVLALQRKLAGTERDLEAIAARVGELTREANALAAGHPAQAVAINARLREVQTGWEDLRATMRRREESLGEARRLQDFLRSLDDFQAWLGRTQTAVASEEGPATLPEAEALLAQHAALRGEVERAQSEYSRLRALGEEVTRDQADPQCLFLRQRLEALGTGWEELGRMWESRQGRLAQAHGFQGFLRDARQAEGVLSSQEYVLSHTEMPGTLQAADAAIKKLEDFMSTMDANGERIHGLLEAGRQLVSEGNIHADKIREKADSIERRHKKNQDAAQQFLGRLRDNREQQHFLQDCHELKLWIDEKMLTAQDVSYDEARNLHTKWQKHQAFMAELAANKDWLDKVDKEGRELTLEKPELKALVSEKLRDLHRRWDELETTTQAKARSLFDANRAELFAQSCCALESWLESLQAQLHSDDYGKDLTSVNILLKKQQMLEWEMAVREKEVEAIQAQAKALAQEDQGAGEVERTSRAVEEKFRALCQPMRERCRRLQASREQHQFHRDVEDEILWVTERLPMASSMEHGKDLPSVQLLMKKNQTLQKEIQGHEPRIADLRERQRALGAAAAGPELAELQEMWKRLGHELELRGKRLEDALRAQQFYRDAAEAEAWMGEQELHMMGQEKAKDELSAQAEVKKHQVLEQALADYAQTIHQLAASSQDMIDHEHPESTRISIRQAQVDKLYAGLKELAGERRERLQEHLRLCQLRRELDDLEQWIQEREVVAASHELGQDYEHVTMLRDKFREFSRDTSTIGQERVDSANALANGLIAGGHAARATVAEWKDSLNEAWADLLELLDTRGQVLAAAYELQRFLHGARQALARVQHKQQQLPDGTGRDLNAAEALQRRHCAYEHDIQALSPQVQQVQDDGHRLQKAYAGDKAEEIGRHMQAVAEAWAQLQGSSAARRQLLLDTTDKFRFFKAVRELMLWMDEVNLQMDAQERPRDVSSADLVIKNQQGIKAEIEARADRFSSCIDMGKELLARSHYAAEEISEKLSQLQARRQETAEKWQEKMDWLQLVLEVLVFGRDAGMAEAWLCSQEPLVRSAELGCTVDEVESLIKRHEAFQKSAVAWEERFCALEKLTALEEREKERKRKREEEERRKQPPAPEPTASVPPGDLVGGQTASDTTWDGTQPRPPPSTQAPSVNGVCTDGEPSQPLLGQQRLEHSSFPEGPGPGSGDEANGPRGERQTRTRGPAPSAMPQSRSTESAHAATLPPRGPEPSAQEQMEGMLCRKQEMEAFGKKAANRSWQNVYCVLRRGSLGFYKDAKAASAGVPYHGEVPVSLARAQGSVAFDYRKRKHVFKLGLQDGKEYLFQAKDEAEMSSWLRVVNAAIATASSASGEPEEPVVPSTTRGMTRAMTMPPVSPVGAEGPVVLRSKDGREREREKRFSFFKKNK

SEQ ID NO: 36466 - protein, 2365 aa, Homo sapiens
  REGION 1..2365: note = ENSP00000433593
MSSTLSPTDFDSLEIQGQYSDINNRWDLPDSDWDNDSSSARLFERSRIKALADEREAVQKKTFTKWVNSHLARVTCRVGDLYSDLRDGRNLLRLLEVLSGEILPKPTKGRMRIHCLENVDKALQFLKEQKVHLENMGSHDIVDGNHRLTLGLVWTIILRFQIQDISVETEDNKEKKSAKDALLLWCQMKTAGYPNVNVHNFTTSWRDGLAFNAIVHKHRPDLLDFESLKKCNAHYNLQNAFNLAEKELGLTKLLDPEDVNVDQPDEKSIITYVATYYHYFSKMKALAVEGKRIGKVLDHAMEAERLVEKYESLASELLQWIEQTIVTLNDRQLANSLSGVQNQLQSFNSYRTVEKPPKFTEKGNLEVLLFTIQSKLRANNQKVYTPREGRLISDINKAWERLEKAEHERELALRTELIRQEKLEQLAARFDRKAAMRETWLSENQRLVSQDNFGLELAAVEAAVRKHEAIETDIVAYSGRVQAVDAVAAELAAERYHDIKRIAARQHNVARLWDFLRQMVAARRERLLLNLELQKVFQDLLYLMDWMEEMKGRLQSQDLGRHLAGVEDLLQLHELVEADIAVQAERVRAVSASALRFCNPGKEYRPCDPQLVSERVAKLEQSYEALCELAAARRARLEESRRLWRFLWEVGEAEAWVREQQHLLASADTGRDLTGALRLLNKHTALRGEMSGRLGPLKLTLEQGQQLVAEGHPGASQASARAAELQAQWERLEALAEERAQRLAQAASLYQFQADANDMEAWLVDALRLVSSPELGHDEFSTQALARQHRALEEEIRSHRPTLDALREQAAALPPTLSRTPEVQSRVPTLERHYEELQARAGERARALEAALALYTMLSEAGACGLWVEEKEQWLNGLALPERLEDLEVVQQRFETLEPEMNTLAAQITAVNDIAEQLLKANPPGKDRIVNTQEQLNHRWQQFRRLADGKKAALTSALSIQNYHLECTETQAWMREKTKVIESTQGLGNDLAGVLALQRKLAGTERDLEAIAARVGELTREANALAAGHPAQAVAINARLREVQTGWEDLRATMRRREESLGEARRLQDFLRSLDDFQAWLGRTQTAVASEEGPATLPEAEALLAQHAALRGEVERAQSEYSRLRALGEEVTRDQADPQCLFLRQRLEALGTGWEELGRMWESRQGRLAQAHGFQGFLRDARQAEGVLSSQEYVLSHTEMPGTLQAADAAIKKLEDFMSTMDANGERIHGLLEAGRQLVSEGNIHADKIREKADSIERRHKKNQDAAQQFLGRLRDNREQQHFLQDCHELKLWIDEKMLTAQDVSYDEARNLHTKWQKHQAFMAELAANKDWLDKVDKEGRELTLEKPELKALVSEKLRDLHRRWDELETTTQAKARSLFDANRAELFAQSCCALESWLESLQAQLHSDDYGKDLTSVNILLKKQQMLEWEMAVREKEVEAIQAQAKALAQEDQGAGEVERTSRAVEEKFRALCQPMRERCRRLQASREQHQFHRDVEDEILWVTERLPMASSMEHGKDLPSVQLLMKKNQTLQKEIQGHEPRIADLRERQRALGAAAAGPELAELQEMWKRLGHELELRGKRLEDALRAQQFYRDAAEAEAWMGEQELHMMGQEKAKDELSAQAEVKKHQVLEQALADYAQTIHQLAASSQDMIDHEHPESTRISIRQAQVDKLYAGLKELAGERRERLQEHLRLCQLRRELDDLEQWIQEREVVAASHELGQDYEHVTMLRDKFREFSRDTSTIGQERVDSANALANGLIAGGHAARATVAEWKDSLNEAWADLLELLDTRGQVLAAAYELQRFLHGARQALARVQHKQQQLPDGTGRDLNAAEALQRRHCAYEHDIQALSPQVQQVQDDGHRLQKAYAGDKAEEIGRHMQAVAEAWAQLQGSSAARRQLLLDTTDKFRFFKAVRELMLWMDEVNLQMDAQERPRDVSSADLVIKNQQGIKAEIEARADRFSSCIDMGKELLARSHYAAEEISEKLSQLQARRQETAEKWQEKMDWLQLVLEVLVFGRDAGMAEAWLCSQEPLVRSAELGCTVDEVESLIKRHEAFQKSAVAWEERFCALEKLTALEEREKERKRKREEEERRKQPPAPEPTASVPPGDLVGGQTASDTTWDGTQPRPPPSTQAPSVNGVCTDGEPSQPLLGQQRLEHSSFPEGPGPGSGDEANGPRGERQTRTRGPAPSAMPQSRSTESAHAATLPPRGPEPSAQEQMEGMLCRKQEMEAFGKKAANRSWQNVYCVLRRGSLGFYKDAKAASAGVPYHGEVPVSLARAQGSVAFDYRKRKHVFKLGLQDGKEYLFQAKDEVSCPSCSSLSVPFQKLPAADSPSFPVLPLFPGLVLCGKTGCVRRPHQAALPV

SEQ ID NO: 36467 - protein, 117 aa, Homo sapiens
  REGION 1..117: note = ENSP00000433631
MSSTLSPTDFDSLEIQGQYSDINNRWDLPDSDWDNDSSSARLFERSRIKALADEREAVQKKTFTKWVNSHLARVTCRVGDLYSDLRDGRNLLRLLEVLSGEILPKPTKGRMRIHCLE

SEQ ID NO: 36468 - protein, 2390 aa, Homo sapiens; identical to SEQ ID NO: 36465
  REGION 1..2390: note = ENSP00000311489

SEQ ID NO: 36469 - protein, 934 aa, Homo sapiens
  REGION 1..934: note = ENSP00000482000
MSSTLSPTDFDSLEIQGQYSDINNRWDLPDSDWDNDSSSARLFERSRIKALADEREAVQKKTFTKWVNSHLARVTCRVGDLYSDLRDGRNLLRLLEVLSGEILPKPTKGRMRIHCLENVDKALQFLKEQKVHLENMGSHDIVDGNHRLTLGLVWTIILRFQIQDISVETEDNKEKKSAKDALLLWCQMKTAGYPNVNVHNFTTSWRDGLAFNAIVHKHRPDLLDFESLKKCNAHYNLQNAFNLAEKELGLTKLLDPEDVNVDQPDEKSIITYVATYYHYFSKMKALAVEGKRIGKVLDHAMEAERLVEKYESLASELLQWIEQTIVTLNDRQLANSLSGVQNQLQSFNSYRTVEKPPKFTEKGNLEVLLFTIQSKLRANNQKVYTPREGRLISDINKAWERLEKAEHERELALRTELIRQEKLEQLAARFDRKAAMRETWLSENQRLVSQDNFGLELAAVEAAVRKHEAIETDIVAYSGRVQAVDAVAAELAAERYHDIKRIAARQHNVARLWDFLRQMVAARRERLLLNLELQKVFQDLLYLMDWMEEMKGRLQSQDLGRHLAGVEDLLQLHELVEADIAVQAERVRAVSASALRFCNPGKEYRPCDPQLVSERVAKLTALEEREKERKRKREEEERRKQPPAPEPTASVPPGDLVGGQTASDTTWDGTQPRPPPSTQAPSVNGVCTDGEPSQPLLGQQRLEHSSFPEGPGPGSGDEANGPRGERQTRTRGPAPSAMPQSRSTESAHAATLPPRGPEPSAQEQMEGMLCRKQEMEAFGKKAANRSWQNVYCVLRRGSLGFYKDAKAASAGVPYHGEVPVSLARAQGSVAFDYRKRKHVFKLGLQDGKEYLFQAKDEAEMSSWLRVVNAAIATASSASGEPEEPVVPSTTRGMTRAMTMPPVSPVGAEGPVVLRSKDGREREREKRFSFFKKNK

SEQ ID NO: 36470 - protein, 934 aa, Homo sapiens; identical to SEQ ID NO: 36469
  REGION 1..934: note = ENSP00000480692

SEQ ID NO: 36471 - protein, 685 aa, Homo sapiens
  REGION 1..685: note = ENSP00000337991
MDFREILMIASKGQGVNNVPKRYSLAVGPPKKDPKVKGVQSAAVQAFLKRKEEELRRKALEEKRRKEELVKKRIELKHDKKARAMAKRTKDNFHGYNGIPIEEKSKKRQATESHTSQGTDREYEMEEENEFLEYNHAESEQEYEEEQEPPKVESKPKVPLKSAPPPMNFTDLLRLAEKKQFEPVEIKVVKKSEERPMTAEELREREFLERKHRRKKLETDGKLPPTVSKKAPSQKESVGTKLSKGSGDRHPSSKGMPLPHAEKKSRPSMANEKHLALSSSKSMPGERIKAGSGNSSQPSLREGHDKPVFNGAGKPHSSTSSPSVPKTSASRTQKSAVEHKAKKSLSHPSHSRPGPMVTPHNKAKSPGVRQPGSSSSSAPGQPSTGVARPTVSSGPVPRRQNGSSSSGPERSISGSKKPTNDSNPSRRTVSGTCGPGQPASSSGGPGRPISGSVSSARPLGSSRGPGRPVSSPHELRRPVSGLGPPGRSVSGPGRSISGSIPAGRTVSNSVPGRPVSSLGPGQTVSSSGPTIKPKCTVVSETISSKNIISRSSNGQMNGMKPPLSGYRAAQGPQRLPFPTGYKRQREYEEEDDDDDEYDSEMEDFIEDEGEPQEEISKHIREIFGYDRKKYKDESDYALRYMESSWKEQQKEEAKSLRLGMQEDLEEMRREEEEMQRRRAKKLKRR

SEQ ID NO: 36472 - protein, 536 aa, Homo sapiens
  REGION 1..536: note = ENSP00000362680
MGSNKSKPKDASQRRRSLEPAENVHGAGGGAFPASQTPSKPASADGHRGPSAAFAPAAAEPKLFGGFNSSDTVTSPQRAGPLAGGVTTFVALYDYESRTETDLSFKKGERLQIVNNTEGDWWLAHSLSTGQTGYIPSNYVAPSDSIQAEEWYFGKITRRESERLLLNAENPRGTFLVRESETTKGAYCLSVSDFDNAKGLNVKHYKIRKLDSGGFYITSRTQFNSLQQLVAYYSKHADGLCHRLTTVCPTSKPQTQGLAKDAWEIPRESLRLEVKLGQGCFGEVWMGTWNGTTRVAIKTLKPGTMSPEAFLQEAQVMKKLRHEKLVQLYAVVSEEPIYIVTEYMSKGSLLDFLKGETGKYLRLPQLVDMAAQIASGMAYVERMNYVHRDLRAANILVGENLVCKVADFGLARLIEDNEYTARQGAKFPIKWTAPEAALYGRFTIKSDVWSFGILLTELTTKGRVPYPGMVNREVLDQVERGYRMPCPPECPESLHDLMCQCWRKEPEERPTFEYLQAFLEDYFTSTEPQYQPGENL

SEQ ID NO: 36473 - protein, 536 aa, Homo sapiens; identical to SEQ ID NO: 36472
  REGION 1..536: note = ENSP00000362668

SEQ ID NO: 36474 - protein, 542 aa, Homo sapiens
  REGION 1..542: note = ENSP00000362659
MGSNKSKPKDASQRRRSLEPAENVHGAGGGAFPASQTPSKPASADGHRGPSAAFAPAAAEPKLFGGFNSSDTVTSPQRAGPLAGGVTTFVALYDYESRTETDLSFKKGERLQIVNNTRKVDVREGDWWLAHSLSTGQTGYIPSNYVAPSDSIQAEEWYFGKITRRESERLLLNAENPRGTFLVRESETTKGAYCLSVSDFDNAKGLNVKHYKIRKLDSGGFYITSRTQFNSLQQLVAYYSKHADGLCHRLTTVCPTSKPQTQGLAKDAWEIPRESLRLEVKLGQGCFGEVWMGTWNGTTRVAIKTLKPGTMSPEAFLQEAQVMKKLRHEKLVQLYAVVSEEPIYIVTEYMSKGSLLDFLKGETGKYLRLPQLVDMAAQIASGMAYVERMNYVHRDLRAANILVGENLVCKVADFGLARLIEDNEYTARQGAKFPIKWTAPEAALYGRFTIKSDVWSFGILLTELTTKGRVPYPGMVNREVLDQVERGYRMPCPPECPESLHDLMCQCWRKEPEERPTFEYLQAFLEDYFTSTEPQYQPGENL

SEQ ID NO: 36475 - protein, 536 aa, Homo sapiens; identical to SEQ ID NO: 36472
  REGION 1..536: note = ENSP00000350941

SEQ ID NO: 36476 - protein, 1183 aa, Homo sapiens
  REGION 1..1183: note = ENSP00000480869
MGNAPSQDPERSSPPMLSADDAEYPREYRTLGGGGGGGSGGRRFSNVGLVHTSERRHTVIAAQSLEALSGLQKADADRKRDAFMDHLKSKYPQHALALRGQQDRMREQPNYWSFKTRSSRHTQGAQPGLADQAAKLSYASAESLETMSEAELPLGFSRMNRFRQSLPLSRSASQTKLRSPGVLFLQFGEETRRVHITHEVSSLDTLHALIAHMFPQKLTMGMLKSPNTAILIKDEARNVFYELEDVRDIQDRSIIKIYRKEPLYAAFPGSHLTNGDLRREMVYASRESSPTRRLNNLSPAPHLASGSPPPGLPSGLPSGLQSGSPSRSRLSYAGGRPPSYAGSPVHHAAERLGGAPAAQGVSPSPSAILERRDVKPDEDLASKAGGMVLVKGEGLYADPYGLLHEGRLSLAAAAGDPFAYPGAGGLYKRGSVRSLSTYSAAALQSDLEDSLYKAAGGGGPLYGDGYGFRLPPSSPQKLADVAAPPGGPPPPHSPYSGPPSRGSPVRQSFRKDSGSSSVFAESPGGKTRSAGSASTAGAPPSELFPGPGERSLVGFGPPVPAKDTETRERMEAMEKQIASLTGLVQSALLRGSEPETPSEKIEGSNGAATPSAPCGSGGRSSGATPVSGPPPPSASSTPAGQPTAVSRLQMQLHLRGLQNSASDLRGQLQQLRKLQLQNQESVRALLKRTEAELSMRVSEAARRQEDPLQRQRTLVEEERLRYLNDEELITQQLNDLEKSVEKIQRDVSHNHRLVPGPELEEKALVLKQLGETLTELKAHFPGLQSKMRVVLRVEVEAVKFLKEEPQRLDGLLKRCRGVTDTLAQIRRQVDEGVWPPPNNLLSQSPKKVTAETDFNKSVDFEMPPPSPPLNLHELSGPAEGASLTPKGGNPTKGLDTPGKRSVDKAVSVEAAERDWEEKRAALTQYSAKDINRLLEETQAELLKAIPDLDCASKAHPGPAPTPDHKPPKAPHGQKAAPRTEPSGRRGSDELTVPRYRTEKPSKSPPPPPPRRSFPSSHGLTTTRTGEVVVTSKKDSAFIKKAESEELEVQKPQVKLRRAVSEVARPASTPPIMASAIKDEDDEDRIIAELESGGGSVPPMKVVTPGASRLKAAQGQAGSPDKSKHGKQRAEYMRIQAQQQATKPSKEMSGSNETSSPVSEKPSASRTSIPVLTSFGARNSSISF

SEQ ID NO: 36477 - protein, 1217 aa, Homo sapiens
  REGION 1..1217: note = ENSP00000488014
MGNAPSQDPERSSPPMLSADDAEYPREYRTLGGGGGGGSGGRRFSNVGLVHTSERRHTVIAAQSLEALSGLQKADADRKRDAFMDHLKSKYPQHALALRGQQDRMREQVGGWTVDPVCLLSSLCSHLHGDSAPSGAGQPAQQPNYWSFKTRSSRHTQGAQPGLADQAAKLSYASAESLETMSEAELPLGFSRMNRFRQSLPLSRSASQTKLRSPGVLFLQFGEETRRVHITHEVSSLDTLHALIAHMFPQKLTMGMLKSPNTAILIKDEARNVFYELEDVRDIQDRSIIKIYRKEPLYAAFPGSHLTNGDLRREMVYASRESSPTRRLNNLSPAPHLASGSPPPGLPSGLPSGLQSGSPSRSRLSYAGGRPPSYAGSPVHHAAERLGGAPAAQGVSPSPSAILERRDVKPDEDLASKAGGMVLVKGEGLYADPYGLLHEGRLSLAAAAGDPFAYPGAGGLYKRGSVRSLSTYSAAALQSDLEDSLYKAAGGGGPLYGDGYGFRLPPSSPQKLADVAAPPGGPPPPHSPYSGPPSRGSPVRQSFRKDSGSSSVFAESPGGKTRSAGSASTAGAPPSELFPGPGERSLVGFGPPVPAKDTETRERMEAMEKQIASLTGLVQSALLRGSEPETPSEKIEGSNGAATPSAPCGSGGRSSGATPVSGPPPPSASSTPAGQPTAVSRLQMQLHLRGLQNSASDLRGQLQQLRKLQLQNQESVRALLKRTEAELSMRVSEAARRQEDPLQRQRTLVEEERLRYLNDEELITQQLNDLEKSVEKIQRDVSHNHRLVPGPELEEKALVLKQLGETLTELKAHFPGLQSKMRVVLRVEVEAVKFLKEEPQRLDGLLKRCRGVTDTLAQIRRQVDEGVWPPPNNLLSQSPKKVTAETDFNKSVDFEMPPPSPPLNLHELSGPAEGASLTPKGGNPTKGLDTPGKRSVDKAVSVEAAERDWEEKRAALTQYSAKDINRLLEETQAELLKAIPDLDCASKAHPGPAPTPDHKPPKAPHGQKAAPRTEPSGRRGSDELTVPRYRTEKPSKSPPPPPPRRSFPSSHGLTTTRTGEVVVTSKKDSAFIKKAESEELEVQKPQVKLRRAVSEVARPASTPPIMASAIKDEDDEDRIIAELESGGGSVPPMKVVTPGASRLKAAQGQAGSPDKSKHGKQRAEYMRIQAQQQATKPSKEMSGSNETSSPVSEKPSASRTSIPVLTSFGARNSSISF

SEQ ID NO: 36478 - protein, 928 aa, Homo sapiens
  REGION 1..928: note = ENSP00000488440
  VARIANT 1: note = Any amino acid
XFPQKLTMGMLKSPNTAILIKDEARNVFYELEDVRDIQDRSIIKIYRKEPLYAAFPGSHLTNGDLRREMVYASRESSPTRRLNNLSPAPHLASGSPPPGLPSGLPSGLQSGSPSRSRLSYAGGRPPSYAGSPVHHAAERLGGAPAAQGVSPSPSAILERRDVKPDEDLASKAGGMVLVKGEGLYADPYGLLHEGRLSLAAAAGDPFAYPGAGGLYKRGSVRSLSTYSAAALQSDLEDSLYKAAGGGGPLYGDGYGFRLPPSSPQKLADVAAPPGGPPPPHSPYSGPPSRGSPVRQSFRKDSGSSSVFAESPGGKTRSAGSASTAGAPPSELFPGPGERSLVGFGPPVPAKDTETRERMEAMEKQIASLTGLVQSALLRGSEPETPSEKIEGSNGAATPSAPCGSGGRSSGATPVSGPPPPSASSTPAGQPTAVSRLQMQLHLRGLQNSASDLRGQLQQLRKLQLQNQESVRALLKRTEAELSMRVSEAARRQEDPLQRQRTLVEEERLRYLNDEELITQQLNDLEKSVEKIQRDVSHNHRLVPGPELEEKALVLKQLGETLTELKAHFPGLQSKMRVVLRVEVEAVKFLKEEPQRLDGLLKRCRGVTDTLAQIRRQVDEGVWPPPNNLLSQSPKKVTAETDFNKSVDFEMPPPSPPLNLHELSGPAEGASLTPKGGNPTKGLDTPGKRSVDKAVSVEAAERDWEEKRAALTQYSAKDINRLLEETQAELLKAIPDLDCASKAHPGPAPTPDHKPPKAPHGQKAAPRTEPSGRRGSDELTVPRYRTEKPSKSPPPPPPRRSFPSSHGLTTTRTGEVVVTSKKDSAFIKKAESEELEVQKPQVKLRRAVSEVARPASTPPIMASAIKDEDDEDRIIAELESGGGSVPPMKVVTPGASRLKAAQGQAGSPDKSKHGKQRAEYMRIQAQQQV

SEQ ID NO: 36479 - protein, 306 aa, Homo sapiens
  REGION 1..306: note = ENSP00000488254
  VARIANT 1: note = Any amino acid
XSEELEVQKPQVKLRRAVSEVARPASTPPIMASAIKDEDDEDRIIAELEVFERSSVSSLPPTPRRQLIPTLLSPQDLGPPGGSAPGPTRKAAPGPRAFCVPRIILTECAPNPPSPPEARLEELGPRTAPTPRPQTLADSTRGWDGPQSPPGVVGETSGPRSSFMPRKEGAALKRLGGGGSSLEDGGARVQCPQGPAQDGTPETSTADTYPEEILKDSGHDAQTCSREHQGQAAANSGRTTWGATAQQMDSLEETLRELEATLSNMGTGPAMGSPGSPPPLPLRPQVAARFSSSSAAFLLHFQSQTE

SEQ ID NO: 36480 - protein, 473 aa, Homo sapiens
  REGION 1..473: note = ENSP00000487679
MQPWQCLRRFALAWWERTAEGRARSPREEAGPRDPGGRGEPDPERSSPPMLSADDAEYPREYRTLGGGGGGGSGGRRFSNVGLVHTSERRHTVIAAQSLEALSGLQKADADRKRDAFMDHLKSKYPQHALALRGQQDRMREQVGGWTVDPVCLLSSLCSHLHGDSAPSGAGQPAQTRSSRHTQGAQPGLADQAAKLSYASAESLETMSEAELPLGFSRMNRFRQSLPLSRSASQTKLRSPGVLFLQFGEETRRVHITHEVSSLDTLHALIAHMFPQKLTMGMLKSPNTAILIKDEARNVFYELEDVRDIQDRSIIKIYRKEPLYAAFPGSHLTNGDLRREMVYASRESSPTRRLNNLSPAPHLASGSPPPGLPSGLPSGLQSGSPSRSRLSYAGGRPPSYAGSPVHHAAERLGGAPAAQGVSPSPSAILERRDVKPDEDLASKAGGMVLVKGEGLYADPYGLLHEGRLSLAAA

SEQ ID NO: 36481 - protein, 1183 aa, Homo sapiens; identical to SEQ ID NO: 36476
  REGION 1..1183: note = ENSP00000484715

SEQ ID NO: 36482 - protein, 1217 aa, Homo sapiens; identical to SEQ ID NO: 36477
  REGION 1..1217: note = ENSP00000483931

SEQ ID NO: 36483 - protein, 928 aa, Homo sapiens; identical to SEQ ID NO: 36478
  REGION 1..928: note = ENSP00000479718
  VARIANT 1: note = Any amino acid

SEQ ID NO: 36484 - protein, 306 aa, Homo sapiens; identical to SEQ ID NO: 36479
  REGION 1..306: note = ENSP00000477811
  VARIANT 1: note = Any amino acid

SEQ ID NO: 36485 - protein, 473 aa, Homo sapiens; identical to SEQ ID NO: 36480
  REGION 1..473: note = ENSP00000478342

SEQ ID NO: 36486 - protein, 1085 aa, Homo sapiens
  REGION 1..1085: note = ENSP00000347198
MSTPSRFKKDKEIIAEYESQVKEIRAQLVEQQKCLEQQTEMRVQLLQDLQDFFRKKAEIETEYSRNLEKLAERFMAKTRSTKDHQQYKKDQNLLSPVNCWYLLLNQVRRESKDHATLSDIYLNNVIMRFMQISEDSTRMFKKSKEIAFQLHEDLMKVLNELYTVMKTYHMYHAESISAESKLKEAEKQEEKQIGRSGDPVFHIRLEERHQRRSSVKKIEKMKEKRQAKYSENKLKSIKARNEYLLTLEATNASVFKYYIHDLSDLIDCCDLGYHASLNRALRTYLSAEYNLETSRHEGLDIIENAVDNLEPRSDKQRFMEMYPAAFCPPMKFEFQSHMGDEVCQVSAQQPVQAELMLRYQQLQSRLATLKIENEEVKKTTEATLQTIQDMVTIEDYDVSECFQHSRSTESVKSTVSETYLSKPSIAKRRANQQETEQFYFMKLREYLEGSNLITKLQAKHDLLQRTLGEGHRAEYMTTRPPNVPPKPQKHRKSRPRSQYNTKLFNGDLETFVKDSGQVIPLIVESCIRFINLYGLQHQGIFRVSGSQVEVNDIKNSFERGENPLADDQSNHDINSVAGVLKLYFRGLENPLFPKERFNDLISCIRIDNLYERALHIRKLLLTLPRSVLIVMRYLFAFLNHLSQYSDENMMDPYNLAICFGPTLMPVPEIQDQVSCQAHVNEIIKTIIIHHETIFPDAKELDGPVYEKCMAGDDYCDSPYSEHGTLEEVDQDAGTEPHTSEDECEPIEAIAKFDYVGRSARELSFKKGASLLLYHRASEDWWEGRHNGIDGLVPHQYIVVQDMDDTFSDTLSQKADSEASSGPVTEDKSSSKDMNSPTDRHPDGYLARQRKRGEPPPPVRRPGRTSDGHCPLHPPHALSNSSVDLGSPSLASHPRGLLQNRGLNNDSPERRRRPGHGSLTNISRHDSLKKIDSPPIRRSTSSGQYTGFNDHKPLDPETIAQDIEETMNTALNELRELERQSTAKHAPDVVLDTLEQVKNSPTPATSTESLSPLHNVALRSSEPQIRRSTSSSSDTMSTFKPMVAPRMGVQLKPPALRPKPAVLPKTNPTIGPAPPPQGPTDKSCTM

SEQ ID NO: 36487 - protein, 1022 aa, Homo sapiens
  REGION 1..1022: note = ENSP00000437948
MRVQLLQDLQDFFRKKAEIETEYSRNLEKLAERFMAKTRSTKDHQQYKKDQNLLSPVNCWYLLLNQVRRESKDHATLSDIYLNNVIMRFMQISEDSTRMFKKSKEIAFQLHEDLMKVLNELYTVMKTYHMYHAESISAESKLKEAEKQEEKQIGRSGDPVFHIRLEERHQRRSSVKKIEKMKEKRQAKYSENKLKSIKARNEYLLTLEATNASVFKYYIHDLSDLIDCCDLGYHASLNRALRTYLSAEYNLETSRHEGLDIIENAVDNLEPRSDKQRFMEMYPAAFCPPMKFEFQSHMGDEVCQVSAQQPVQAELMLRYQQLQSRLATLKIENEEVKKTTEATLQTIQDMVTIEDYDVSECFQHSRSTESVKSTVSETYLSKPSIAKRRANQQETEQFYFMKLREYLEGSNLITKLQAKHDLLQRTLGEGHRAEYMTTSRGRRNSHTRHQDSGQVIPLIVESCIRFINLYGLQHQGIFRVSGSQVEVNDIKNSFERGENPLADDQSNHDINSVAGVLKLYFRGLENPLFPKERFNDLISCIRIDNLYERALHIRKLLLTLPRSVLIVMRYLFAFLNHLSQYSDENMMDPYNLAICFGPTLMPVPEIQDQVSCQAHVNEIIKTIIIHHETIFPDAKELDGPVYEKCMAGDDYCDSPYSEHGTLEEVDQDAGTEPHTSEDECEPIEAIAKFDYVGRSARELSFKKGASLLLYHRASEDWWEGRHNGIDGLVPHQYIVVQDMDDTFSDTLSQKADSEASSGPVTEDKSSSKDMNSPTDRHPDGYLARQRKRGEPPPPVRRPGRTSDGHCPLHPPHALSNSSVDLGSPSLASHPRGLLQNRGLNNDSPERRRRPGHGSLTNISRHDSLKKIDSPPIRRSTSSGQYTGFNDHKPLDPETIAQDIEETMNTALNELRELERQSTAKHAPDVVLDTLEQVKNSPTPATSTESLSPLHNVALRSSEPQIRRSTSSSSDTMSTFKPMVAPRMGVQLKPPALRPKPAVLPKTNPTIGPAPPPQGPTDKSCTM

SEQ ID NO: 36488 - protein, 1022 aa, Homo sapiens; identical to SEQ ID NO: 36487
  REGION 1..1022: note = ENSP00000485752

SEQ ID NO: 36489 - protein, 158 aa, Homo sapiens
  REGION 1..158: note = ENSP00000242465
MMQKLLKCSRLVLALALILVLESSVQGYPTRRARYQWVRCNPDSNSANCLEEKGPMFELLPGESNKIPRLRTDLFPKTRIQDLNRIFPLSEDYSGSGFGSGSGSGSGSGSGFLTEMEQDYQLVDESDAFHDNLRSLDRNLPSDSQDLGQHGLEEDFML

SEQ ID NO: 36490 - protein, 464 aa, Homo sapiens
  REGION 1..464: note = ENSP00000367794
MGSPAHRPALLLLLPPLLLLLLLRVPPSRSFPGSGDSPLEDDEVGYSHPRYKDTPWCSPIKVKYGDVYCRAPQGGYYKTALGTRCDIRCQKGYELHGSSLLICQSNKRWSDKVICKQKRCPTLAMPANGGFKCVDGAYFNSRCEYYCSPGYTLKGERTVTCMDNKAWSGRPASCVDMEPPRIKCPSVKERIAEPNKLTVRVSWETPEGRDTADGILTDVILKGLPPGSNFPEGDHKIQYTVYDRAENKGTCKFRVKVRVKRCGKLNAPENGYMKCSSDGDNYGATCEFSCIGGYELQGSPARVCQSNLAWSGTEPTCAAMNVNVGVRTAAALLDQFYEKRRLLIVSTPTARNLLYRLQLGMLQQAQCGLDLRHITVVELVGVFPTLIGRIGAKIMPPALALQLRLLLRIPLYSFSMVLVDKHGMDKERYVSLVMPVALFNLIDTFPLRKEEMVLQAEMSQTCNT

SEQ ID NO: 36491 - protein, 405 aa, Homo sapiens
  REGION 1..405: note = ENSP00000411165
MGSPAHRPALLLLLPPLLLLLLLRVPPSRSFPGSGDSPLEDDEVGYSHPRYKDTPWCSPIKVKYGDVYCRAPQGGYYKTALGTRCDIRCQKGYELHGSSLLICQSNKRWSDKVICKHMEPPRIKCPSVKERIAEPNKLTVRVSWETPEGRDTADGILTDVILKGLPPGSNFPEGDHKIQYTVYDRAENKGTCKFRVKVRVKRCGKLNAPENGYMKCSSDGDNYGATCEFSCIGGYELQGSPARVCQSNLAWSGTEPTCAAMNVNVGVRTAAALLDQFYEKRRLLIVSTPTARNLLYRLQLGMLQQAQCGLDLRHITVVELVGVFPTLIGRIGAKIMPPALALQLRLLLRIPLYSFSMVLVDKHGMDKERYVSLVMPVALFNLIDTFPLRKEEMVLQAEMSQTCNT

SEQ ID NO: 36492 - protein, 444 aa, Homo sapiens
  REGION 1..444: note = ENSP00000440758
MGSPAHRPALLLLLPPLLLLLLLRVPPSRSFPDTPWCSPIKVKYGDVYCRAPQGGYYKTALGTRCDIRCQKGYELHGSSLLICQSNKRWSDKVICKQKRCPTLAMPANGGFKCVDGAYFNSRCEYYCSPGYTLKGERTVTCMDNKAWSGRPASCVDMEPPRIKCPSVKERIAEPNKLTVRVSWETPEGRDTADGILTDVILKGLPPGSNFPEGDHKIQYTVYDRAENKGTCKFRVKVRVKRCGKLNAPENGYMKCSSDGDNYGATCEFSCIGGYELQGSPARVCQSNLAWSGTEPTCAAMNVNVGVRTAAALLDQFYEKRRLLIVSTPTARNLLYRLQLGMLQQAQCGLDLRHITVVELVGVFPTLIGRIGAKIMPPALALQLRLLLRIPLYSFSMVLVDKHGMDKERYVSLVMPVALFNLIDTFPLRKEEMVLQAEMSQTCNT

SEQ ID NO: 36493 - protein, 379 aa, Homo sapiens
  REGION 1..379: note = ENSP00000445034
MGSPAHRPALLLLLPPLLLLLLLRVPPSRSFPGSGDSPLEDDEVGYSHPRYKDTPWCSPIKVKYGDVYCRAPQGGYYKTALGTRCDIRCQKGYELHGSSLLICQSNKRWSDKVICKQKRCPTLAMPANGGFKCVDGAYFNSRCEYYCSPGYTLKGERTVTCMDNKAWSGRPASCVDMEPPRIKCPSVKERIAEPNKLTVRVSWETPEGRDTADGILTDVILKGLPPGSNFPEGDHKIQYTVYDRAENKGTCKFRVKVRVKRCGKLNAPENGYMKCSSDGDNYGATCEFSCIGGYELQGSPARVCQSNLAWSGTEPTCAAMNVNVGVRTAAALLDQFYEKRRLLIVSTPTARNLLYRLQLGMLQAVAANPTLLLQYGASG

SEQ ID NO: 36494 - protein, 611 aa, Homo sapiens
  REGION 1..611: note = ENSP00000267260
MASVQQGEKQLFEKFWRGTFKAVATPRPESIIVASITARKPLPRTEPQNNPVVPAQDGPSEKLGQHLATEPLGTNSWERDKTCRELGATRGHSASHDKDLTPPPSSRGKKKKKKSTRKKRRRSSSYSPSPVKKKKKKSSKKHKRRRSFSKKRRHSSSSPKSKRRDEKRHKKQSRSRPRKSHRHRHHRCPSRSQSSESRPSSCESRHRGRSPEEGQKSRRRHSRRCSKTLCKDSPEAQSSRPPSQPLQMLGYLSARGVITGSGSAADLFTKTASPLTTSRGRSQEYDSGNDTSSPPSTQTSSARSRGQEKGSPSGGLSKSRELNSGNTSDSGNSFTTSSPQNKGAMLENLSPTSRGRESRGFQSPCLECAEVKKSSLVPSTARSSPMKGCSRSSSYASTRSSSHSSRSPNPRASPRYTQSRSTSSEKRSYSRSPSYSSKSGKRSPPSRSSRSRRSPSYSRYSPSRERDPKYSEKDSQQRERERARRRRRSYSPMRKRRRDSPSHLEARRITSARKRPIPYYRPSPSSSGSLSSTSSWYSSSSSRSASRSYSRSRSRSRSRRRSRTRTSSSSSSRSPSPGSRSRSRSRSRSRSRSRSQSRSYSSADSYSSTRR

SEQ ID NO: 36495 - protein, 66 aa, Homo sapiens
  REGION 1..66: note = ENSP00000493188
  VARIANT 1: note = Any amino acid
XHRGRSPEEGQKSRRRHSRRCSKTLCKDSPEAQSSRPPSQPLQMLGYLSARGVEEFLLDHWVGVCC

SEQ ID NO: 36496 - protein, 95 aa, Homo sapiens
  REGION 1..95: note = ENSP00000484891
MHRDSCPLDCKVYVGNLGNNGNKTELERAFGYYGPLRSVWVARNPPGFAFVEFEDPRDAADAVRELDGRLECNGVILARCNLCLLGSSDSPASAA

SEQ ID NO: 36497 - protein, 164 aa, Homo sapiens
  REGION 1..164: note = ENSP00000362820
MHRDSCPLDCKVYVGNLGNNGNKTELERAFGYYGPLRSVWVARNPPGFAFVEFEDPRDAADAVRELDGRTLCGCRVRVELSNGEKRSRNRGPPPSWGRRPRDDYRRRSPPPRRRSPRRRSFSRSRSRSLSRDRRRERSLSRERNHKPSRSFSRSRSRSRSNERK

SEQ ID NO: 36498 - protein, 124 aa, Homo sapiens
  REGION 1..124: note = ENSP00000436036
MHRDSCPLDCKVYVGNLGNNGNKTELERAFGYYGPLRSVWVARNPPGFAFVEFEDPRDAADAVRELDGRTLCGCRVRVELSNGEKRSRNRGPPPSWGRRPRDDYRRRSPPPRRRVTIMSLLTTL

SEQ ID NO: 36499 - protein, 164 aa, Homo sapiens; identical to SEQ ID NO: 36497
  REGION 1..164: note = ENSP00000482833

SEQ ID NO: 36500 - protein, 1049 aa, Homo sapiens
  REGION 1..1049: note = ENSP00000315713
MALVTLQRSPTPSAASSSASNSELEAGSEEDRKLNLSLSESFFMVKGAALFLQQGSSPQGQRSLQHPHKHAGDLPQHLQVMINLLRCEDRIKLAVRLESAWADRVRYMVVVYSSGRQDTEENILLGVDFSSKESKSCTIGMVLRLWSDTKIHLDGDGGFSVSTAGRMHIFKPVSVQAMWSALQVLHKACEVARRHNYFPGGVALIWATYYESCISSEQSCINEWNAMQDLESTRPDSPALFVDKPTEGERTERLIKAKLRSIMMSQDLENVTSKEIRNELEKQMNCNLKELKEFIDNEMLLILGQMDKPSLIFDHLYLGSEWNASNLEELQGSGVDYILNVTREIDNFFPGLFAYHNIRVYDEETTDLLAHWNEAYHFINKAKRNHSKCLVHCKMGVSRSASTVIAYAMKEFGWPLEKAYNYVKQKRSITRPNAGFMRQLSEYEGILDASKQRHNKLWRQQTDSSLQQPVDDPAGPGDFLPETPDGTPESQLPFLDDAAQPGLGPPLPCCFRRLSDPLLPSPEDETGSLVHLEDPEREALLEEAAPPAEVHRPARQPQQGSGLCEKDVKKKLEFGSPKGRSGSLLQVEETEREEGLGAGRWGQLPTQLDQNLLNSENLNNNSKRSCPNGMEDDAIFGILNKVKPSYKSCADCMYPTASGAPEASRERCEDPNAPAICTQPAFLPHITSSPVAHLASRSRVPEKPASGPTEPPPFLPPAGSRRADTSGPGAGAALEPPASLLEPSRETPKVLPKSLLLKNSHCDKNPPSTEVVIKEESSPKKDMKPAKDLRLLFSNESEKPTTNSYLMQHQESIIQLQKAGLVRKHTKELERLKSVPADPAPPSRDGPASRLEASIPEESQDPAALHELGPLVMPSQAGSDEKSEAAPASLEGGSLKSPPPFFYRLDHTSSFSKDFLKTICYTPTSSSMSSNLTRSSSSDSIHSVRGKPGLVKQRTQEIETRLRLAGLTVSSPLKRSHSLAKLGSLTFSTEDLSSEADPSTVADSQDTTLSESSFLHEPQGTPRDPAATSKPSGKPAPENLKSPSWMSKS

SEQ ID NO: 36501 - protein, 95 aa, Homo sapiens
  REGION 1..95: note = ENSP00000447629
  VARIANT 1: note = Any amino acid
XAMQDLESTRPDSPALFVDKPTEGERTERLIKAKLRSIMMSQDLENVTSKEIRNELEKQMNCNLKELKEFIDNEMLLILGQMDKPSLIFDHLYLG

SEQ ID NO: 36502 - protein, 692 aa, Homo sapiens
  REGION 1..692: note = ENSP00000448824
MALVTLQRSPTPSAASSSASNSELEAGSEEDRKLNLSLSESFFMVKGAALFLQQGSSPQGQRSLQHPHKHAGDLPQHLQVMINLLRCEDRIKLAVRLESAWADRVRYMVVVYSSGRQDTEENILLGVDFSSKESKSCTIGMVLRLWSDTKIHLDGDGGFSVSTAGRMHIFKPVSVQAMWSALQVLHKACEVARRHNYFPGGVALIWATYYESCISSEQSCINEWNAMQDLESTRPDSPALFVDKPTEGERTERLIKAKLRSIMMSQDLENVTSKEIRNELEKQMNCNLKELKEFIDNEMLLILGQMDKPSLIFDHLYLGSEWNASNLEELQGSGVDYILNVTREIDNFFPGLFAYHNIRVYDEETTDLLAHWNEAYHFINKAKRNHSKCLVHCKMGVSRSASTVIAYAMKEFGWPLEKAYNYVKQKRSITRPNAGFMRQLSEYEGILDASKQRHNKLWRQQTDSSLQQPVDDPAGPGDFLPETPDGTPESQLPFLDDAAQPGLGPPLPCCFRRLSDPLLPSPEDETGSLVHLEDPEREALLEEAAPPAEVHRPARQPQQGSGLCEKDVKKKLEFGSPKGRSGSLLQVEETEREEGLGAGRWGQLPTQLDQNLLNSENLNNNSKRSCPNGMEVGRARPAGWHTPSLPSHSNWPTSASVVGTTGTRHHTQLIFFYCLLWAPSSHLQGPEGSFTG

SEQ ID NO: 36503 - protein, 703 aa, Homo sapiens
  REGION 1..703: note = ENSP00000326107
MARARRAVVGSVRDVSTAATNLFYFTDFCIFLQPTHCFCCPEVSSSNYLSESFFMVKGAALFLQQGSSPQGQRSLQHPHKHAGDLPQHLQVMINLLRCEDRIKLAVRLESAWADRVRYMVVVYSSGRQDTEENILLGVDFSSKESKSCTIGMVLRLWSDTKIHLDGDGGFSVSTAGRMHIFKPVSVQAMWSALQVLHKACEVARRHNYFPGGVALIWATYYESCISSEQSCINEWNAMQDLESTRPDSPALFVDKPTEGERTERLIKAKLRSIMMSQDLENVTSKEIRNELEKQMNCNLKELKEFIDNEMLLILGQMDKPSLIFDHLYLGSEWNASNLEELQGSGVDYILNVTREIDNFFPGLFAYHNIRVYDEETTDLLAHWNEAYHFINKAKRNHSKCLVHCKMGVSRSASTVIAYAMKEFGWPLEKAYNYVKQKRSITRPNAGFMRQLSEYEGILDASKQRHNKLWRQQTDSSLQQPVDDPAGPGDFLPETPDGTPESQLPFLDDAAQPGLGPPLPCCFRRLSDPLLPSPEDETGSLVHLEDPEREALLEEAAPPAEVHRPARQPQQGSGLCEKDVKKKLEFGSPKGRSGSLLQVEETEREEGLGAGRWGQLPTQLDQNLLNSENLNNNSKRSCPNGMEVGRARPAGWHTPSLPSHSNWPTSASVVGTTGTRHHTQLIFFYCLLWAPSSHLQGPEGSFTG

SEQ ID NO: 36504 - protein, 37 aa, Homo sapiens
  REGION 1..37: note = ENSP00000448586
MALVTLQRSPTPSAASSSASNSELEAGSEEDRKLNLR

SEQ ID NO: 36505 - protein, 154 aa, Homo sapiens
  REGION 1..154: note = ENSP00000446652
MVSKAKVIVNGWLFPACLGFCLSESFFMVKGAALFLQQGSSPQGQRSLQHPHKHAGDLPQHLQVMINLLRCEDRIKLAVRLESAWADRVRYMVVVYSSGRQDTEENILLGVDFSSKESKSCTIGMVLRLWSDTKIHLDGDGGFSVSTAGRMHIF

SEQ ID NO: 36506 - protein, 391 aa, Homo sapiens
  REGION 1..391: note = ENSP00000267377
MFPNGTASSPSSSPSPSPGSCGEGGGSRGPGAGAADGMEEPGRNASQNGTLSEGQGSAILISFIYSVVCLVGLCGNSMVIYVILRYAKMKTATNIYILNLAIADELLMLSVPFLVTSTLLRHWPFGALLCRLVLSVDAVNMFTSIYCLTVLSVDRYVAVVHPIKAARYRRPTVAKVVNLGVWVLSLLVILPIVVFSRTAANSDGTVACNMLMPEPAQRWLVGFVLYTFLMGFLLPVGAICLCYVLIIAKMRMVALKAGWQQRKRSERKITLMVMMVVMVFVICWMPFYVVQLVNVFAEQDDATVSQLSVILGYANSCANPILYGFLSDNFKRSFQRILCLSWMDNAAEEPVDYYATALKSRAYSVEDFQPENLESGGVFRNGTCTSRITTL

SEQ ID NO: 36507 - protein, 369 aa, Homo sapiens
  REGION 1..369: note = ENSP00000350198
MDMADEPLNGSHTWLSIPFDLNGSVVSTNTSNQTEPYYDLTSNAVLTFIYFVVCIIGLCGNTLVIYVILRYAKMKTITNIYILNLAIADELFMLGLPFLAMQVALVHWPFGKAICRVVMTVDGINQFTSIFCLTVMSIDRYLAVVHPIKSAKWRRPRTAKMITMAVWGVSLLVILPIMIYAGLRSNQWGRSSCTINWPGESGAWYTGFIIYTFILGFLVPLTIICLCYLFIIIKVKSSGIRVGSSKRKKSEKKVTRMVSIVVAVFIFCWLPFYIFNVSSVSMAISPTPALKGMFDFVVVLTYANSCANPILYAFLSDNFKKSFQNVLCLVKVSGTDDGERSDSKQDKSRLNETTETQRTLLNGDLQTSI

SEQ ID NO: 36508 - protein, 369 aa, Homo sapiens
  REGION 1..369: note = ENSP00000216218
MDPRKVNELRAFVKMCKQDPSVLHTEEMRFLREWVESMGGKVPPATQKAKSEENTKEEKPDSKKVEEDLKADEPSSEESDLEIDKEGVIEPDTDAPQEMGDENAEITEEMMDQANDKKVAAIEALNDGELQKAIDLFTDAIKLNPRLAILYAKRASVFVKLQKPNAAIRDCDRAIEINPDSAQPYKWRGKAHRLLGHWEEAAHDLALACKLDYDEDASAMLKEVQPRAQKIAEHRRKYERKREEREIKERIERVKKAREEHERAQREEEARRQSGAQYGSFPGGFPGGMPGNFPGGMPGMGGGMPGMAGMPGLNEILSDPEVLAAMQDPEVMVAFQDVAQNPANMSKYQSNPKVMNLISKLSAKFGGQA

SEQ ID NO: 36509 - protein, 38 aa, Homo sapiens
  REGION 1..38: note = ENSP00000397062
MDPRKVNELRAFVKMCKQDPSVLHTEEMRFLREWVERN

SEQ ID NO: 36510 - protein, 146 aa, Homo sapiens
  REGION 1..146: note = ENSP00000412049
  VARIANT 1: note = Any amino acid
XIEPDTDAPQEMGDENAEITEEMMDQANDKKVAAIEALNDGELQKAIDLFTDAIKLNPRLAILYAKRASVFVKLQKPNAAIRDCDRAIEINPDSAQPYKWRGKAHRLLGHWEEAAHDLALACKLDYDEDASAMLKEVQPRVCTTTL

SEQ ID NO: 36511 - protein, 162 aa, Homo sapiens
  REGION 1..162: note = ENSP00000392067
MGGKVPPATQKAKSEENTKEEKPDSKKVEEDLKADEPSSEESDLEIDKEGVIEPDTDAPQEMGDENAEITEEMMDQANDKKVAAIEALNDGELQKAIDLFTDAIKLNPRLAILYAKRASVFVKLQKPNAAIRDCDRAIEINPDSAQPYKWRGKAHRLLGHWE

SEQ ID NO: 36512 - protein, 211 aa, Homo sapiens [sequence omitted]

SEQ ID NO: 36513 - protein, 1047 aa, Homo sapiens
  REGION 1..1047: note = ENSP00000276480
MDAEAEDKTLRTRSKGTEVPMDSLIQELSVAYDCSMAKKRTAEDQALGVPVNKRKSLLMKPRHYSPKADCQEDRSDRTEDDGPLETHGHSTAEEIMIKPMDESLLSTAQENSSRKEDRYSCYQELMVKSLMHLGKFEKNVSVQTVSENLNDSGIQSLKAESDEADECFLIHSDDGRDKIDDSQPPFCSSDDNESNSESAENGWDSGSNFSEETKPPRVPKYVLTDHKKDLLEVPEIKTEGDKFIPCENRCDSETERKDPQNALAEPLDGNAQPSFPDVEEEDSESLAVMTEEGSDLEKAKGNLSLLEQAIALQAERGCVFHNTYKELDRFLLEHLAGERRQTKVIDMGGRQIFNNKHSPRPEKRETKCPIPGCDGTGHVTGLYPHHRSLSGCPHKVRVPLEILAMHENVLKCPTPGCTGRGHVNSNRNTHRSLSGCPIAAAEKLAMSQDKNQLDSPQTGQCPDQAHRTSLVKQIEFNFPSQAITSPRATVSKEQEKFGKVPFDYASFDAQVFGKRPLIQTVQGRKTPPFPESKHFPNPVKFPNRLPSAGAHTQSPGRASSYSYGQCSEDTHIAAAAAILNLSTRCREATDILSNKPQSLHAKGAEIEVDENGTLDLSMKKNRILDKSAPLTSSNTSIPTPSSSPFKTSSILVNAAFYQALCDQEGWDTPINYSKTHGKTEEEKEKDPVSSLENLEEKKFPGEASIPSPKPKLHARDLKKELITCPTPGCDGSGHVTGNYASHRSVSGCPLADKTLKSLMAANSQELKCPTPGCDGSGHVTGNYASHRSLSGCPRARKGGVKMTPTKEEKEDPELKCPVIGCDGQGHISGKYTSHRTASGCPLAAKRQKENPLNGASLSWKLNKQELPHCPLPGCNGLGHVNNVFVTHRSLSGCPLNAQVIKKGKVSEELMTIKLKATGGIESDEEIRHLDEEIKELNESNLKIEADMMKLQTQITSMESNLKTIEEENKLIEQNNESLLKELAGLSQALISSLADIQLPQMGPISEQNFEAYVNTLTDMYSNLERDYSPECKALLESIKQAVKGIHV

SEQ ID NO: 36514 - protein, 94 aa, Homo sapiens
  REGION 1..94: note = ENSP00000429579
MDAEAEDKTLRTRSKGTEVPMDSLIQELSVAYDCSMAKKRTAEDQALGVPVNKRKSLLMKPRHYSPKADCQEDRSDRTEDDGPLETHGHSTRKS

SEQ ID NO: 36515 - protein, 41 aa, Homo sapiens
  REGION 1..41: note = ENSP00000428920
MDAEAEDKTLRTRSKGTEVPMDSLIQELRISVPVDMRPLTW

SEQ ID NO: 36516 - protein, 364 aa, Homo sapiens
  REGION 1..364: note = ENSP00000430763
MDAEAEDKTLRTRSKGTEVPMDSLIQELSVAYDCSMAKKRTAEDQALGVPVNKRKSLLMKPRHYSPKADCQEDRSDRTEDDGPLETHGHSTAEEIMIKPMDESLLSTAQENSSRKEDRYSCYQELMVKSLMHLGKFEKNVSVQTVSENLNDSGIQSLKAESDEADECFLIHSDDGRDKIDDSQPPFCSSDDNESNSESAENGWDSGSNFSEETKPPRVPKYVLTDHKKDLLEVPEIKTEGDKFIPCENRCDSETERKDPQNALAEPLDGNAQPSFPDVEEEDSESLAVMTEEGSDLEKAKGNLSLLEQAIALQAERGCVFHNTYKELDRFLLEHLAGERRQTKVIDMGGRQIFNNKHYPPIKLC

SEQ ID NO: 36517 - protein, 620 aa, Homo sapiens
  REGION 1..620: note = ENSP00000428521
MDAEAEDKTLRTRSKGTEVPMDSLIQELSVAYDCSMAKKRTAEDQALGVPVNKRKSLLMKPRHYSPKADCQEDRSDRTEDDGPLETHGHSTAEEIMIKPMDESLLSTAQENSSRKEDRYSCYQELMVKSLMHLGKFEKNVSVQTVSENLNDSGIQSLKAESDEADECFLIHSDDGRDKIDDSQPPFCSSDDNESNSESAENGWDSGSNFSEETKPPRVPKYVLTDHKKDLLEVPEIKTEGDKFIPCENRCDSETERKDPQNALAEPLDGNAQPSFPDVEEEDSESLAVMTEEGSDLEKAKGNLSLLEQAIALQAERGCVFHNTYKELDRFLLEHLAGERRQTKVIDMGGRQIFNNKHSPRPEKRETKCPIPGCDGTGHVTGLYPHHRSLSGCPHKVRVPLEILAMHENVLKCPTPGCTGRGHVNSNRNTHRSLSGCPIAAAEKLAMSQDKNQLDSPQTGQCPDQAHRTSLVKQIEFNFPSQAITSPRATVSKEQEKFGKVPFDYASFDAQVFGKRPLIQTVQGRKTPPFPESKHFPNPVKFPNRLPSAGAHTQSPGRASSYSYGQCSEDTHIAAAAAILNLSTRCREATDILSNKPQSLHAKGAEIEVDENGTLDLSMKK

SEQ ID NO: 36518 - protein, 12 aa, Homo sapiens
  REGION 1..12: note = ENSP00000428096
MDAEAEDKTLRT

SEQ ID NO: 36519 - protein, 350 aa, Homo sapiens
  REGION 1..350: note = ENSP00000377257
MKCSLRVWFLSVAFLLVFIMSLLFTYSHHSMATLPYLDSGALDGTHRVKLVPGYAGLQRLSKERLSGKSCACRRCMGDAGASDWFDSHFDGNISPVWTRENMDLPPDVQRWWMMLQPQFKSHNTNEVLEKLFQIVPGENPYRFRDPHQCRRCAVVGNSGNLRGSGYGQDVDGHNFIMRMNQAPTVGFEQDVGSRTTHHFMYPESAKNLPANVSFVLVPFKVLDLLWIASALSTGQIRFTYAPVKSFLRVDKEKVQIYNPAFFKYIHDRWTEHHGRYPSTGMLVLFFALHVCDEVNVYGFGADSRGNWHHYWENNRYAGEFRKTGVHDADFEAHIIDMLAKASKIEVYRGN

SEQ ID NO: 36520 - protein, 350 aa, Homo sapiens; identical to SEQ ID NO: 36519
  REGION 1..350: note = ENSP00000345477

SEQ ID NO: 36521 - protein, 418 aa, Homo sapiens
  REGION 1..418: note = ENSP00000491316
MRTKAAGCAERRPLQPRTEAAAAPAGRAMPSEYTYVKLRSDCSRPSLQWYTRAQSKMRRPSLLLKDILKCTLLVFGVWILYILKLNYTTEECDMKKMHYVDPDHVKRAQKYAQQVLQKECRPKFAKTSMALLFEHRYSVDLLPFVQKAPKDSEAESKYDPPFGFRKFSSKVQTLLELLPEHDLPEHLKAKTCRRCVVIGSGGILHGLELGHTLNQFDVVIRLNSAPVEGYSEHVGNKTTIRMTYPEGAPLSDLEYYSNDLFVAVLFKSVDFNWLQAMVKKETLPFWVRLFFWKQVAEKIPLQPKHFRILNPVIIKETAFDILQYSEPQSRFWGRDKNVPTIGVIAVVLATHLCDEVSLAGFGYDLNQPRTPLHYFDSQCMAAMNFQTMHNVTTETKFLLKLVKEGVVKDLSGGIDREF

SEQ ID NO: 36522 - protein, 49 aa, Homo sapiens
  REGION 1..49: note = ENSP00000492030
EECDMKKMHYVDPDHVKTYTVPLKEAGPSLLKHSVSPGTSIFKPSLFSP

SEQ ID NO: 36523 - protein, 395 aa, Homo sapiens
  REGION 1..395: note = ENSP00000377397
MASVPMPSEYTYVKLRSDCSRPSLQWYTRAQSKMRRPSLLLKDILKCTLLVFGVWILYILKLNYTTEECDMKKMHYVDPDHVKRAQKYAQQVLQKECRPKFAKTSMALLFEHRYSVDLLPFVQKAPKDSEAESKYDPPFGFRKFSSKVQTLLELLPEHDLPEHLKAKTCRRCVVIGSGGILHGLELGHTLNQFDVVIRLNSAPVEGYSEHVGNKTTIRMTYPEGAPLSDLEYYSNDLFVAVLFKSVDFNWLQAMVKKETLPFWVRLFFWKQVAEKIPLQPKHFRILNPVIIKETAFDILQYSEPQSRFWGRDKNVPTIGVIAVVLATHLCDEVSLAGFGYDLNQPRTPLHYFDSQCMAAMNFQTMHNVTTETKFLLKLVKEGVVKDLSGGIDREF

SEQ ID NO: 36524 - protein, 390 aa, Homo sapiens
  REGION 1..390: note = ENSP00000377394
MPSEYTYVKLRSDCSRPSLQWYTRAQSKMRRPSLLLKDILKCTLLVFGVWILYILKLNYTTEECDMKKMHYVDPDHVKRAQKYAQQVLQKECRPKFAKTSMALLFEHRYSVDLLPFVQKAPKDSEAESKYDPPFGFRKFSSKVQTLLELLPEHDLPEHLKAKTCRRCVVIGSGGILHGLELGHTLNQFDVVIRLNSAPVEGYSEHVGNKTTIRMTYPEGAPLSDLEYYSNDLFVAVLFKSVDFNWLQAMVKKETLPFWVRLFFWKQVAEKIPLQPKHFRILNPVIIKETAFDILQYSEPQSRFWGRDKNVPTIGVIAVVLATHLCDEVSLAGFGYDLNQPRTPLHYFDSQCMAAMNFQTMHNVTTETKFLLKLVKEGVVKDLSGGIDREF

SEQ ID NO: 36525 - protein, 390 aa, Homo sapiens; identical to SEQ ID NO: 36524
  REGION 1..390: note = ENSP00000491564

SEQ ID NO: 36526 - protein, 47 aa, Homo sapiens
  REGION 1..47: note = ENSP00000491395
  VARIANT 1: note = Any amino acid
XRTKAAGCAERRPLQPRTEAAAAPAGRGTVKTVVCKAETPACMESAF

SEQ ID NO: 36527 - protein, 107 aa, Homo sapiens
  REGION 1..107: note = ENSP00000491398
MRTKAAGCAERRPLQPRTEAAAAPAGRAMPSEYTYVKLRSDCSRPSLQWYTRAQSKMRRPSLLLKDILKCTLLVFGVWILYILKLNYTTEECDMKKMHYVDPDHVKV

SEQ ID NO: 36528 - protein, 378 aa, Homo sapiens
  REGION 1..378: note = ENSP00000366549
MRTKAAGCAERRPLQPRTEAAAAPAGRAMPSEYTYVKLRSDCSRPSLQWYTRAQSKMRRPSLLLKDILKCTLLVFGVWILYILKLNYTTEECDMKKMHYVDPDHVKKAPKDSEAESKYDPPFGFRKFSSKVQTLLELLPEHDLPEHLKAKTCRRCVVIGSGGILHGLELGHTLNQFDVVIRLNSAPVEGYSEHVGNKTTIRMTYPEGAPLSDLEYYSNDLFVAVLFKSVDFNWLQAMVKKETLPFWVRLFFWKQVAEKIPLQPKHFRILNPVIIKETAFDILQYSEPQSRFWGRDKNVPTIGVIAVVLATHLCDEVSLAGFGYDLNQPRTPLHYFDSQCMAAMNFQTMHNVTTETKFLLKLVKEGVVKDLSGGIDREF

SEQ ID NO: 36529 - protein, 365 aa, Homo sapiens
  REGION 1..365: note = ENSP00000492045
MRTKAAGCAERRPLQPRTEAAAAPAGRAMPSEYTYVKLRSDCSRPSLQWYTRAQSKMRRPSLLLKDILKCTLLVFGVWILYILKLNYTTEECDMKKMHYVDPDHVKRAQKYAQQVLQKECRPKFAKTSMALLFEHRYSVDLLPFVQKAPKDSEAESKYDPPFGFRKFSSKVQTLLELLPEHDLPEHLKAKTCRRCVVIGSGGILHGLELGHTLNQFDVVIRLNSAPVEGYSEHVGNKTTIRMTYPEGAPLSDLEYYSNDLFVAVLFKSVDFNWLQAMVKKETLNVPTIGVIAVVLATHLCDEVSLAGFGYDLNQPRTPLHYFDSQCMAAMNFQTMHNVTTETKFLLKLVKEGVVKDLSGGIDREF

SEQ ID NO: 36530 - protein, 61 aa, Homo sapiens
  REGION 1..61: note = ENSP00000491495
  VARIANT 1: note = Any amino acid
XKKMHYVDPDHVKMQLLKRRPGSLASIQLAHAPLSSPVAISELLRVPLATSQMFLSVLGDL

SEQ ID NO: 36531 - protein, 437 aa, Homo sapiens
  REGION 1..437: note = ENSP00000492098
MCHHAQGSRQSLCSVGYSCAPAPEGLRKRQRLRGTRQKSNIKRQCFTMPSEYTYVKLRSDCSRPSLQWYTRAQSKMRRPSLLLKDILKCTLLVFGVWILYILKLNYTTEECDMKKMHYVDPDHVKRAQKYAQQVLQKECRPKFAKTSMALLFEHRYSVDLLPFVQKAPKDSEAESKYDPPFGFRKFSSKVQTLLELLPEHDLPEHLKAKTCRRCVVIGSGGILHGLELGHTLNQFDVVIRLNSAPVEGYSEHVGNKTTIRMTYPEGAPLSDLEYYSNDLFVAVLFKSVDFNWLQAMVKKETLPFWVRLFFWKQVAEKIPLQPKHFRILNPVIIKETAFDILQYSEPQSRFWGRDKNVPTIGVIAVVLATHLCDEVSLAGFGYDLNQPRTPLHYFDSQCMAAMNFQTMHNVTTETKFLLKLVKEGVVKDLSGGIDREF

SEQ ID NO: 36532 - protein, 223 aa, Homo sapiens
  REGION 1..223: note = ENSP00000492089
AERRPLQPRTEAAAAPAGRAMPSEYTYVKLRSDCSRPSLQWYTRAQSKMRRPSLLLKDILKCTLLVFGVWILYILKLNYTTEECDMKKMHYVDPDHVKRAQKYAQQVLQKECRPKFAKTSMALLFEHRYSVDLLPFVQKAPKDSEAESKYDPPFGFRKFSSKVQTLLELLPEHDLPEHLKAKTCRRCVVIGSGGILHGLELGHTLNQFDVVIRVLISTGFKQW

SEQ ID NO: 36533 - protein, 47 aa, Homo sapiens
  REGION 1..47: note = ENSP00000492602
MRTKAAGCAERRPLQPRTEAAAAPAGRGTVKTVVCKAETPACMESAF

SEQ ID NO: 36534 - protein, 78 aa, Homo sapiens
  REGION 1..78: note = ENSP00000491084
  VARIANT 1: note = Any amino acid
XVKLRSDCSRPSLQWYTRAQSKMRRPSLLLKDILKCTLLVFGVWILYILKLNYTTEECDMKKMHYVDPDHVKVVSSSF

SEQ ID NO: 36535 - protein, 390 aa, Homo sapiens; identical to SEQ ID NO: 36524
  REGION 1..390: note = ENSP00000491828

SEQ ID NO: 36536 - protein, 110 aa, Homo sapiens
  REGION 1..110: note = ENSP00000492305
MPSEYTYVKLRSDCSRPSLQWYTRAQSKMRRPSLLLKDILKCTLLVFGVWILYILKLNYTTEECDMKKMHYVDPDHVKTYTVPLKEAGPSLLKHSVSPGTSIFKPSLFSP

SEQ ID NO: 36537 - protein, 390 aa, Homo sapiens; identical to SEQ ID NO: 36524
  REGION 1..390: note = ENSP00000492299

SEQ ID NO: 36538 - protein, 390 aa, Homo sapiens; identical to SEQ ID NO: 36524
  REGION 1..390: note = ENSP00000492753

SEQ ID NO: 36539 - protein, 247 aa, Homo sapiens
  REGION 1..247: note = ENSP00000492459
  VARIANT 1: note = Any amino acid
XGCAERRPLQPRTEAAAAPAGRAMPSEYTYVKLRSDCSRPSLQWYTRAQSKMRRPSLLLKDILKCTLLVFGVWILYILKLNYTTEECDMKKMHYVDPDHVKRAQKYAQQVLQKECRPKFAKTSMALLFEHRYSVDLLPFVQKAPKDSEAESKYDPPFGFRKFSSKVQTLLELLPEHDLPEHLKAKTCRRCVVIGSGGILHGLELGHTLNQFDVVIRTQCTALGQCGSRNSEGHRKLFTVPAHKGLNV

SEQ ID NO: 36540 - protein, 231 aa, Homo sapiens
  REGION 1..231: note = ENSP00000492847
  VARIANT 1: note = Any amino acid
XRTKAAGCAERRPLQPRTEAAAAPAGRAMPSEYTYVKLRSDCSRPSLQWYTRAQSKMRRPSLLLKDILKCTLLVFGVWILYILKLNYTTEECDMKKMHYVDPDHVKRAQKYAQQVLQKECRPKFAKTSMALLFEHRYSVDLLPFVQKAPKDSEAESKYDPPFGFRKFSSKVQTLLELLPEHDLPEHLKAKTCRRCVVIGSGGILHGLELGHTLNQFDVVIRVLISTGFKQW

SEQ ID NO: 36541 - protein, 47 aa, Homo sapiens; identical to SEQ ID NO: 36533
  REGION 1..47: note = ENSP00000491027

SEQ ID NO: 36542 - protein, 112 aa, Homo sapiens
  REGION 1..112: note = ENSP00000492209
MRTKAAGCAERRPLQPRTEAAAAPAGRAMPSEYTYVKLRSDCSRPSLQWYTRAQSKMRRPSLLLKDILKCTLLVFGVWILYILKLNYTTEECDMKKMHYVDPDHVKVVSSSF

SEQ ID NO: 36543 - protein, 47 aa, Homo sapiens; identical to SEQ ID NO: 36533
  REGION 1..47: note = ENSP00000491356

SEQ ID NO: 36544 - protein, 47 aa, Homo sapiens; identical to SEQ ID NO: 36533
  REGION 1..47: note = ENSP00000492635

SEQ ID NO: 36545 - protein, 149 aa, Homo sapiens
  REGION 1..149: note = ENSP00000492468
MRTKAAGCAERRPLQPRTEAAAAPAGRAMPSEYTYVKLRSDCSRPSLQWYTRAQSKMRRPSLLLKDILKELRNMLSKSCRRNVVPSLPRHQWRCYLSTGIAWTYSLLCRRPPKTVKLSPSTILLLGSGSSPVKSRPSWNSCQSTTSLNT

SEQ ID NO: 36546 - protein, 47 aa, Homo sapiens; identical to SEQ ID NO: 36533
  REGION 1..47: note = ENSP00000491802

SEQ ID NO: 36547 - protein, 138 aa, Homo sapiens
  REGION 1..138: note = ENSP00000491238
MRTKAAGCAERRPLQPRTEAAAAPAGRAMPSEYTYVKLRSDCSRPSLQWYTRAQSKMRRPSLLLKDILKCTLLVFGVWILYILKLNYTTEECDMKKMHYVDPDHVKTYTVPLKEAGPSLLKHSVSPGTSIFKPSLFSP

SEQ ID NO: 36548 - protein, 184 aa, Homo sapiens
  REGION 1..184: note = ENSP00000492035
  VARIANT 1: note = Any amino acid
XAMPSEYTYVKLRSDCSRPSLQWYTRAQSKMRRPSLLLKDILKCTLLVFGVWILYILKLNYTTEECDMKKMHYVDPDHVKTLSPCGWHCVQLIMARWTQPLLHRLLSDSADLHRAFKGSRALPAEAFSEPRHQHLQTESFLSLVLLPAFQAFLGYLRESSEICSASLAEGMSSQVCQDINGAVI

SEQ ID NO: 36549 - protein, 337 aa, Homo sapiens
  REGION 1..337: note = ENSP00000492103
MPSEYTYVKLRSDCSRPSLQWYTRAQSKMRRPSLLLKDILKCTLLVFGVWILYILKLNYTTEECDMKKMHYVDPDHVKRAQKYAQQVLQKECRPKFAKTSMALLFEHRYSVDLLPFVQKAPKDSEAESKYDPPFGFRKFSSKVQTLLELLPEHDLPEHLKAKTCRRCVVIGSGGILHGLELGHTLNQFDVVIRLNSAPVEGYSEHVGNKTTIRMTYPEGAPLSDLEYYSNDLFVAVLFKSVDFNWLQAMVKKETLNVPTIGVIAVVLATHLCDEVSLAGFGYDLNQPRTPLHYFDSQCMAAMNFQTMHNVTTETKFLLKLVKEGVVKDLSGGIDREF

SEQ ID NO: 36550 - protein, 149 aa, Homo sapiens; identical to SEQ ID NO: 36545
  REGION 1..149: note = ENSP00000490979

SEQ ID NO: 36551 - protein, 110 aa, Homo sapiens; identical to SEQ ID NO: 36536
  REGION 1..110: note = ENSP00000491699

SEQ ID NO: 36552 - protein, 407 aa, Homo sapiens
  REGION 1..407: note = ENSP00000492244
  VARIANT 1: note = Any amino acid
XRTKAAGCAERRPLQPRTEAAAAPAGRAMPSEYTYVKLRSDCSRPSLQWYTRAQSKMRRPSLLLKDILKCTLLVFGVWILYILKLNYTTEECDMKKMHYVDPDHVKRAQKYAQQVLQKECRPKFAKTSMALLFEHRYSVDLLPFVQKAPKDSEAESKYDPPFGFRKFSSKVQTLLELLPEHDLPEHLKAKTCRRCVVIGSGGILHGLELGHTLNQFDVVIRLNSAPVEGYSEHVGNKTTIRMTYPEGAPLSDLEYYSNDLFVAVLFKSVDFNWLQAMVKKETLVAEKIPLQPKHFRILNPVIIKETAFDILQYSEPQSRFWGRDKNVPTIGVIAVVLATHLCDEVSLAGFGYDLNQPRTPLHYFDSQCMAAMNFQTMHNVTTETKFLLKLVKEGVVKDLSGGIDREF

SEQ ID NO: 36553 - protein, 390 aa, Homo sapiens; identical to SEQ ID NO: 36524
  REGION 1..390: note = ENSP00000491853

SEQ ID NO: 36554 - protein, 112 aa, Homo sapiens; identical to SEQ ID NO: 36542
  REGION 1..112: note = ENSP00000492473

SEQ ID NO: 36555 - protein, 107 aa, Homo sapiens
  REGION 1..107: note = ENSP00000492280
MRTKAAGCAERRPLQPRTEAAAAPAGRAMPSEYTYVKLRSDCSRPSLQWYTRAQSKMRRPSLLLKDILKCTLLVFGVWILYILKLNYTTEECDMKKMHYVDPDHVKS

SEQ ID NO: 36556 - protein, 107 aa, Homo sapiens; identical to SEQ ID NO: 36555
  REGION 1..107: note = ENSP00000492866

SEQ ID NO: 36557 - protein, 114 aa, Homo sapiens
  REGION 1..114: note = ENSP00000492097
MRTKAAGCAERRPLQPRTEAAAAPAGRAMPSEYTYVKLRSDCSRPSLQWYTRAQSKMRRPSLLLKDILKCTLLVFGVWILYILKLNYTTEECDMKKMHYVDPDHVKLLKVRHSP

SEQ ID NO: 36558 - protein, 107 aa, Homo sapiens
  REGION 1..107: note = ENSP00000491172
  VARIANT 1: note = Any amino acid
XYTYVKLRSDCSRPSLQWYTRAQSKMRRPSLLLKDILKCTLLVFGVWILYILKLNYTTEECDMKKMHYVDPDHVKTYTVPLKEAGPSLLKHSVSPGTSIFKPSLFSP

SEQ ID NO: 36559 - protein, 14 aa, Homo sapiens
  REGION 1..14: note = ENSP00000491443
  VARIANT 1: note = Any amino acid
XCKAETPACMESAF

SEQ ID NO: 36560 - protein, 135 aa, Homo sapiens
  REGION 1..135: note = ENSP00000491880
  VARIANT 1: note = Any amino acid
XGCAERRPLQPRTEAAAAPAGRAMPSEYTYVKLRSDCSRPSLQWYTRAQSKMRRPSLLLKDILKCTLLVFGVWILYILKLNYTTEECDMKKMHYVDPDHVKRAQKYAQQVLQKECRPKFAKTSMALLFEHRARPP

SEQ ID NO: 36561 - protein, 39 aa, Homo sapiens
  REGION 1..39: note = ENSP00000491315
AERRPLQPRTEAAAAPAGRGTVKTVVCKAETPACMESAF

SEQ ID NO: 36562 - protein, 73 aa, Homo sapiens
  REGION 1..73: note = ENSP00000491038
  VARIANT 1: note = Any amino acid
XDCSRPSLQWYTRAQSKMRRPSLLLKDILKCTLLVFGVWILYILKLNYTTEECDMKKMHYVDPDHVKVVSSSF

SEQ ID NO: 36563 - protein, 104 aa, Homo sapiens
  REGION 1..104: note = ENSP00000491664
  VARIANT 1: note = Any amino acid
XVKLRSDCSRPSLQWYTRAQSKMRRPSLLLKDILKCTLLVFGVWILYILKLNYTTEECDMKKMHYVDPDHVKTYTVPLKEAGPSLLKHSVSPGTSIFKPSLFSP

SEQ ID NO: 36564 - protein, 73 aa, Homo sapiens
  REGION 1..73: note = ENSP00000492710
SDCSRPSLQWYTRAQSKMRRPSLLLKDILKCTLLVFGVWILYILKLNYTTEECDMKKMHYVDPDHVKVKQCTS

SEQ ID NO: 36565 - protein, 103 aa, Homo sapiens
  REGION 1..103: note = ENSP00000491701
VKLRSDCSRPSLQWYTRAQSKMRRPSLLLKDILKCTLLVFGVWILYILKLNYTTEECDMKKMHYVDPDHVKTYTVPLKEAGPSLLKHSVSPGTSIFKPSLFSP

SEQ ID NO: 36566 - protein, 43 aa, Homo sapiens
  REGION 1..43: note = ENSP00000306247
MRTKAAGCAERRPLQPRTEAAAAPAGRDVHCLCLECGSFISSS

SEQ ID NO: 36567 - protein, 47 aa, Homo sapiens; identical to SEQ ID NO: 36533
  REGION 1..47: note = ENSP00000491029

SEQ ID NO: 36568 - protein, 41 aa, Homo sapiens
  REGION 1..41: note = ENSP00000491857
ILKCTLLVFGVWILYILKLNYTTEECDMKKMHYVDPDHVKS

SEQ ID NO: 36569 - protein, 139 aa, Homo sapiens
  REGION 1..139: note = ENSP00000401375
MPSEYTYVKLRSDCSRPSLQWYTRAQSKMRRPSLLLKDILKCTLLVFGVWILYILKLNYTTEECDMKKMHYVDPDHVKRAQKYAQQVLQKECRPKFAKTSMALLFEHRYSVDLLPFVQKAPKDSEAESKYDPPFGFRKF

SEQ ID NO: 36570 - protein, 18 aa, Homo sapiens
  REGION 1..18: note = ENSP00000491917
VKTVVCKAETPACMESAF

SEQ ID NO: 36571 - protein, 220 aa, Homo sapiens
  REGION 1..220: note = ENSP00000491314
MRTKAAGCAERRPLQPRTEAAAAPAGRAMPSEYTYVKLRSDCSRPSLQWYTRAQSKMRRPSLLLKDILKCTLLVFGVWILYILKLNYTTEECDMKKMHYVDPDHVKTLSPCGWHCVQLIMARWTQPLLHRLLSDSADLHRAFKGSRALPAEAFSEPRHQHLQTESFLSLVLLPAFQAFLGYLRAPEGAALALRHFLLSCELWASSGGGREQLKQMPVQLT

SEQ ID NO: 36572 - protein, 47 aa, Homo sapiens; identical to SEQ ID NO: 36533
  REGION 1..47: note = ENSP00000408635

SEQ ID NO: 36573 - protein, 37 aa, Homo sapiens
  REGION 1..37: note = ENSP00000491126
MPSEYTYVKLRSDCSRPSLQWYTRAQSKMRRPSLLLK

SEQ ID NO: 36574 - protein, 717 aa, Homo sapiens
  REGION 1..717: note = ENSP00000435097
MTMTANKNSSITHGAGGTKAPRGTLSRKSFEFEDASSLQSLYPSSPTENGTENQPKFGSKSTLEENAYEDIVGDLPKENPYEDVDLKSRRAGRKSQQLSENSLDSLHRMWSPQDRKYNSPPTQLSLKPNSQSLRSGNWSERKSHRLPRLPKRHSHDDMLLLAQLSLPSSPSSLNEDSLSTTSELLSSRRARRIPKLVQRINSIYNAKRGKKRLKKLSMSSIETASLRDENSESESDSDDRFKAHTQRLVHIQSMLKRAPSYRTLELELLEWQERELFEYFVVVSLKKKPSRNTYLPEVSYQFPKLDRPTKQMREAEERLKAIPQFCFPDAKDWLPVSEYSSETFSFMLTGEDGSRRFGYCRRLLPSGKGPRLPEVYCVISRLGCFGLFSKVLDEVERRRGISAALVYPFMRSLMESPFPAPGKTIKVKTFLPGAGNEVLELRRPMDSRLEHVDFECLFTCLSVRQLIRIFASLLLERRVIFVADKLSTLSSCSHAVVALLYPFSWQHTFIPVLPASMIDIVCCPTPFLVGLLSSSLPKLKELPVEEALMVNLGSDRFIRQMDDEDTLLPRKLQAALEQALERKNELISQDSDSDSDDECNTLNGLVSEVFIRFFVETVGHYSLFLTQSEKGERAFQREAFRKSVASKSIRRFLEVFMESQMFAGFIQDRELRKCRAKGLFEQRVEQYLEELPDTEQSGMNKFLRGLGNKMKFLHKKN

SEQ ID NO: 36575 - protein, 1137 aa, Homo sapiens
  REGION 1..1137: note = ENSP00000433528
MTMTANKNSSITHGAGGTKAPRGTLSRSQSVSPPPVLSPPRSPIYPLSDSETSACRYPSHSSSRVLLKDRHPPAPSPQNPQDPSPDTSPPTCPFKTASFGYLDRSPSACKRDAQKESVQGAAQDVAGVAACLPLAQSTPFPGPAAGPRGVLLTRTGTRAHSLGIREKISAWEGRREASPRMSMCGEKREGSGSEWAASEGCPSLGCPSVVPSPCSSEKTFDFKGLRRMSRTFSECSYPETEEEGEALPVRDSFYRLEKRLGRSEPSAFLRGHGSRKESSAVLSRIQKIEQVLKEQPGRGLPQLPSSCYSVDRGKRKTGTLGSLEEPAGGASVSAGSRAVGVAGVAGEAGPPPEREGSGSTKPGTPGNSPSSQRLPSKSSLDPAVNPVPKPKRTFEYEADKNPKSKPSNGLPPSPTPAAPPPLPSTPAPPVTRRPKKDMRGHRKSQSRKSFEFEDASSLQSLYPSSPTENGTENQPKFGSKSTLEENAYEDIVGDLPKENPYEDVDLKSRRAGRKSQQLSENSLDSLHRMWSPQDRKYNSPPTQLSLKPNSQSLRSGNWSERKSHRLPRLPKRHSHDDMLLLAQLSLPSSPSSLNEDSLSTTSELLSSRRARRIPKLVQRINSIYNAKRGKKRLKKLSMSSIETASLRDENSESESDSDDRFKAHTQRLVHIQSMLKRAPSYRTLELELLEWQERELFEYFVVVSLKKKPSRNTYLPEVSYQFPKLDRPTKQMREAEERLKAIPQFCFPDAKDWLPVSEYSSETFSFMLTGEDGSRRFGYCRRLLPSGKGPRLPEVYCVISRLGCFGLFSKVLDEVERRRGISAALVYPFMRSLMESPFPAPGKTIKVKTFLPGAGNEVLELRRPMDSRLEHVDFECLFTCLSVRQLIRIFASLLLERRVIFVADKLSTLSSCSHAVVALLYPFSWQHTFIPVLPASMIDIVCCPTPFLVGLLSSSLPKLKELPVEEALMVNLGSDRFIRQMDDEDTLLPRKLQAALEQALERKNELISQDSDSDSDDECNTLNGLVSEVFIRFFVETVGHYSLFLTQSEKGERAFQREAFRKSVASKSIRRFLEVFMESQMFAGFIQDRELRKCRAKGLFEQRVEQYLEELPDTEQSGMNKFLRGLGNKMKFLHKKN

SEQ ID NO: 36576 - protein, 1137 aa, Homo sapiens; identical to SEQ ID NO: 36575
  REGION 1..1137: note = ENSP00000319678

SEQ ID NO: 36577 - protein, 609 aa, Homo sapiens
  REGION 1..609: note = ENSP00000432887
MWSPQDRKYNSPPTQLSLKPNSQSLRSGNWSERKSHRLPRLPKRHSHDDMLLLAQLSLPSSPSSLNEDSLSTTSELLSSRRARRIPKLVQRINSIYNAKRGKKRLKKLSMSSIETASLRDENSESESDSDDRFKAHTQRLVHIQSMLKRAPSYRTLELELLEWQERELFEYFVVVSLKKKPSRNTYLPEVSYQFPKLDRPTKQMREAEERLKAIPQFCFPDAKDWLPVSEYSSETFSFMLTGEDGSRRFGYCRRLLPSGKGPRLPEVYCVISRLGCFGLFSKVLDEVERRRGISAALVYPFMRSLMESPFPAPGKTIKVKTFLPGAGNEVLELRRPMDSRLEHVDFECLFTCLSVRQLIRIFASLLLERRVIFVADKLSTLSSCSHAVVALLYPFSWQHTFIPVLPASMIDIVCCPTPFLVGLLSSSLPKLKELPVEEALMVNLGSDRFIRQMDDEDTLLPRKLQAALEQALERKNELISQDSDSDSDDECNTLNGLVSEVFIRFFVETVGHYSLFLTQSEKGERAFQREAFRKSVASKSIRRFLEVFMESQMFAGFIQDRELRKCRAKGLFEQRVEQYLEELPDTEQSGMNKFLRGLGNKMKFLHKKN

SEQ ID NO: 36578 - protein, 650 aa, Homo sapiens
  REGION 1..650: note = ENSP00000436808
MPTLQRDLPKENPYEDVDLKSRRAGRKSQQLSENSLDSLHRMWSPQDRKYNSPPTQLSLKPNSQSLRSGNWSERKSHRLPRLPKRHSHDDMLLLAQLSLPSSPSSLNEDSLSTTSELLSSRRARRIPKLVQRINSIYNAKRGKKRLKKLSMSSIETASLRDENSESESDSDDRFKAHTQRLVHIQSMLKRAPSYRTLELELLEWQERELFEYFVVVSLKKKPSRNTYLPEVSYQFPKLDRPTKQMREAEERLKAIPQFCFPDAKDWLPVSEYSSETFSFMLTGEDGSRRFGYCRRLLPSGKGPRLPEVYCVISRLGCFGLFSKVLDEVERRRGISAALVYPFMRSLMESPFPAPGKTIKVKTFLPGAGNEVLELRRPMDSRLEHVDFECLFTCLSVRQLIRIFASLLLERRVIFVADKLSTLSSCSHAVVALLYPFSWQHTFIPVLPASMIDIVCCPTPFLVGLLSSSLPKLKELPVEEALMVNLGSDRFIRQMDDEDTLLPRKLQAALEQALERKNELISQDSDSDSDDECNTLNGLVSEVFIRFFVETVGHYSLFLTQSEKGERAFQREAFRKSVASKSIRRFLEVFMESQMFAGFIQDRELRKCRAKGLFEQRVEQYLEELPDTEQSGMNKFLRGLGNKMKFLHKKN

SEQ ID NO: 36579 - protein, 328 aa, Homo sapiens
  REGION 1..328: note = ENSP00000433349
MVLDEVERRRGISAALVYPFMRSLMESPFPAPGKTIKVKTFLPGAGNEVLELRRPMDSRLEHVDFECLFTCLSVRQLIRIFASLLLERRVIFVADKLSTLSSCSHAVVALLYPFSWQHTFIPVLPASMIDIVCCPTPFLVGLLSSSLPKLKELPVEEALMVNLGSDRFIRQMDDEDTLLPRKLQAALEQALERKNELISQDSDSDSDDECNTLNGLVSEVFIRFFVETVGHYSLFLTQSEKGERAFQREAFRKSVASKSIRRFLEVFMESQMFAGFIQDRELRKCRAKGLFEQRVEQYLEELPDTEQSGMNKFLRGLGNKMKFLHKKN

SEQ ID NO: 36580 - protein, 717 aa, Homo sapiens; identical to SEQ ID NO: 36574
  REGION 1..717: note = ENSP00000436802

SEQ ID NO: 36581 - protein, 111 aa, Homo sapiens
  REGION 1..111: note = ENSP00000433043
  VARIANT 1: note = Any amino acid
XPASVCASSSESLPHCCWSAGSFLWQISSAASEHIPGPFWEGRSQGLVLGLAGYSSSANLGSWKRCPSCSAWGLPLAGEGRVPSPAAPTRWWPCSTPSPGSTPSFLSSRPP

SEQ ID NO: 36582 - protein, 344 aa, Homo sapiens
  REGION 1..344: note = ENSP00000433588
MWSPQDRKYNSPPTQLSLKPNSQSLRSGNWSERKSHRLPRLPKRHSHDDMLLLAQLSLPSSPSSLNEDSLSTTSELLSSRRARRIPKLVQRINSIYNAKRGKKRLKKLSMSSIETASLRDENSESESDSDDRFKAHTQRLVHIQSMLKRAPSYRTLELELLEWQERELFEYFVVVSLKKKPSRNTYLPEVSYQFPKLDRPTKQMREAEERLKAIPQFCFPDAKDWLPVSEYSSETFSFMLTGEDGSRRFGYCRRLLPSGKGPRLPEVYCVISRLGCFGLFSKVLDEVERRRGISAALVYPFMRSLMESPFPAPGKTIKVKTFLPGAGNEVLELRRPMDSRLEHV

SEQ ID NO: 36583 - protein, 98 aa, Homo sapiens
  REGION 1..98: note = ENSP00000435016
  VARIANT 1: note = Any amino acid
XVHIQSMLKRAPSYRTLELELLEWQERELFEYFVVVSLKKKPSRNTYLPEVSYQFPKLDRPTKQMREAEERLKAIPQFCFPDAKDWLPVSEYSPLTPP

SEQ ID NO: 36584 - protein, 356 aa, Homo sapiens
  REGION 1..356: note = ENSP00000433793
MTSRKNGGGAHSWQETPWEQRRALGLQRAEMTMTANKNSSITHGAGGTKAPRGTLSRKSFEFEDASSLQSLYPSSPTENGTENQPKFGSKSTLEENAYEDIVGDLPKENPYEDVDLKSRRAGRKSQQLSENSLDSLHRMWSPQDRKYNSPPTQLSLKPNSQSLRSGNWSERKSHRLPRLPKRHSHDDMLLLAQLSLPSSPSSLNEDSLSTTSELLSSRRARRIPKLVQRINSIYNAKRGKKRLKKLSMSSIETASLRDENSESESDSDDRFKAHTQRLVHIQSMLKRAPSYRTLELELLEWQERELFEYFVVVSLKKKPSRNTYLPEVSYQFPKECAFSSSSRGCWLLLISQALLK

SEQ ID NO: 36585 - protein, 217 aa, Homo sapiens
  REGION 1..217: note = ENSP00000437096
MWSPQDRKYNSPPTQLSLKPNSQSLRSGNWSERKSHRLPRLPKRHSHDDMLLLAQLSLPSSPSSLNEDSLSTTSELLSSRRARRIPKLVQRINSIYNAKRGKKRLKKLSMSSIETASLRAHTQRLVHIQSMLKRAPSYRTLELELLEWQERELFEYFVVVSLKKKPSRNTYLPEVSYQFPKLDRPTKQMREAEERLKAIPQFCFPDAKDWLPVSEYS

SEQ ID NO: 36586 - protein, 179 aa, Homo sapiens
  REGION 1..179: note = ENSP00000431580
MWSPQDRKYNSPPTQLSLKPNSQSLRSGNWSERKSHRLPRLPKRHSHDDMLLLAQLSLPSSPSSLNEDSLSTTSELLSSRRARRIPKLVQRINSIYNAKRGKKRLKKLSMSSIETASLRDENSESESDSDDRFKAHTQRLVHIQSMLKRAPSYRTLELELLEWQERELFEYFVVVSLKK

SEQ ID NO: 36587 - protein, 145 aa, Homo sapiens
  REGION 1..145: note = ENSP00000433858
GRKSQQLSENSLDSLHRMWSPQDRKYNSPPTQLSLKPNSQSLRSGNWSERKSHRLPRLPKRHSHDDMLLLAQLSLPSSPSSLNEDSLSTTSELLSSRRARRIPKVPSPEAAHWSRAGGRAGSQPFSLFPGFLPSLIWTASSIPFE

SEQ ID NO: 36588 - protein, 47 aa, Homo sapiens
  REGION 1..47: note = ENSP00000437006
MWSPQDRKYNSPPTQLSLKPNSQSLRSGNWSERKSHRLPRLPKRHSH

SEQ ID NO: 36589 - protein, 148 aa, Homo sapiens
  REGION 1..148: note = ENSP00000431564
MTMTANKNSSITHGAGGTKAPRGTLSRKSFEFEDASSLQSLYPSSPTENGTENQPKFGSKSTLEENAYEDIVGDLPKENPYEDVDLKSRRAGRKSQQLSENSLDSLHRMWSPQDRKYNSPPTQLSLKPNSQSLRSGNWSERKSHRLPR

SEQ ID NO: 36590 - protein, 137 aa, Homo sapiens
  REGION 1..137: note = ENSP00000434701
MTMTANKNSSITHGAGGTKAPRGTLSRKSFEFEDASSLQSLYPSSPTENGTENQPKFGSKSTLEENAYEDIVGDLPKENPYEDVDLKSRRAGRKSQQLSENSLDSLHRMWSPQDRKYNSPPTQPVPAQWELVRKEEP

SEQ ID NO: 36591 - protein, 135 aa, Homo sapiens
  REGION 1..135: note = ENSP00000432521
MTMTANKNSSITHGAGGTKAPRGTLSRKSFEFEDASSLQSLYPSSPTENGTENQPKFGSKSTLEENAYEDIVGDLPKENPYEDVDLKSRRAGRKSQQLSENSLDSLHRMWSPQDRKYNSPPTQLSLKPNSQSLRS

SEQ ID NO: 36592 - protein, 77 aa, Homo sapiens
  REGION 1..77: note = ENSP00000436506
MTMTANKNSSITHGAGGTKAPRGTLSRKSFEFEDASSLQSLYPSSPTENGTENQPKFGSKSTLEENAYEDIVGDLPK

SEQ ID NO: 36593 - protein, 76 aa, Homo sapiens
  REGION 1..76: note = ENSP00000435292
MTMTANKNSSITHGAGGTKAPRGTLSRKSFEFEDASSLQSLYPSSPTENGTENQPKFGSKSTLEENAYEDIVGDLP

SEQ ID NO: 36594 - protein, 72 aa, Homo sapiens
  REGION 1..72: note = ENSP00000436760
MTMTANKNSSITHGAGGTKAPRGTLSRKSFEFEDASSLQSLYPSSPTENGTENQPKFGSKSTLEENAYEDIV

SEQ ID NO: 36595 - protein, 154 aa, Homo sapiens
  REGION 1..154: note = ENSP00000433647
MTMTANKNSSITHGAGGTKAPRGTLSRSQSVSPPPVLSPPRSPIYPLSDSETSACRYPSHSSSRVLLKDRHPPAPSPQNPQDPSPDTSPPTCPFKTASFGYLDRSPSACKRDAQKESVQGAAQDVAGVAACLPLAQSTPFPGPAAGPRGVLLTR

SEQ ID NO: 36596 - protein, 183 aa, Homo sapiens
  REGION 1..183: note = ENSP00000431252
MTSRKNGGGAHSWQETPWEQRRALGLQRAEMTMTANKNSSITHGAGGTKAPRGTLSRSQSVSPPPVLSPPRSPIYPLSDSETSACRYPSHSSSRVLLKDRHPPAPSPQNPQDPSPDTSPPTCPFKTASFGYLDRSPSACKRDAQKESVQGAAQDVAGVAACLPLAQSTPFPGPAAGPRGVLLT

SEQ ID NO: 36597 - protein, 144 aa, Homo sapiens
  REGION 1..144: note = ENSP00000434935
MTMTANKNSSITHGAGGTKAPRGTLSRSQSVSPPPVLSPPRSPIYPLSDSETSACRYPSHSSSRVLLKDRHPPAPSPQNPQDPSPDTSPPTCPFKTASFGYLDRSPSACKRDAQKESVQGAAQDVAGVAACLPLAQSTPFPGPA

SEQ ID NO: 36598 - protein, 142 aa, Homo sapiens
  REGION 1..142: note = ENSP00000433346
MTMTANKNSSITHGAGGTKAPRGTLSRSQSVSPPPVLSPPRSPIYPLSDSETSACRYPSHSSSRVLLKDRHPPAPSPQNPQDPSPDTSPPTCPFKTASFGYLDRSPSACKRDAQKESVQGAAQDVAGVAACLPLAQSTPFPG

SEQ ID NO: 36599 - protein, 139 aa, Homo sapiens
  REGION 1..139: note = ENSP00000433008
MTMTANKNSSITHGAGGTKAPRGTLSRSQSVSPPPVLSPPRSPIYPLSDSETSACRYPSHSSSRVLLKDRHPPAPSPQNPQDPSPDTSPPTCPFKTASFGYLDRSPSACKRDAQKESVQGAAQDVAGVAACLPLAQSTP

SEQ ID NO: 36600 - protein, 155 aa, Homo sapiens
  REGION 1..155: note = ENSP00000431332
MQFVEKFQRALGLQRAEMTMTANKNSSITHGAGGTKAPRGTLSRSQSVSPPPVLSPPRSPIYPLSDSETSACRYPSHSSSRVLLKDRHPPAPSPQNPQDPSPDTSPPTCPFKTASFGYLDRSPSACKRDAQKESVQGAAQDVAGVAACLPLAQST

SEQ ID NO: 36601 - protein, 124 aa, Homo sapiens
  REGION 1..124: note = ENSP00000431139
MTMTANKNSSITHGAGGTKAPRGTLSRSQSVSPPPVLSPPRSPIYPLSDSETSACRYPSHSSSRVLLKDRHPPAPSPQNPQDPSPDTSPPTCPFKTASFGYLDRSPSACKRDAQKESVQGAAQD

SEQ ID NO: 36602 - protein, 122 aa, Homo sapiens
  REGION 1..122: note = ENSP00000432872
MTMTANKNSSITHGAGGTKAPRGTLSRSQSVSPPPVLSPPRSPIYPLSDSETSACRYPSHSSSRVLLKDRHPPAPSPQNPQDPSPDTSPPTCPFKTASFGYLDRSPSACKRDAQKESVQGAA

SEQ ID NO: 36603 - protein, 111 aa, Homo sapiens
  REGION 1..111: note = ENSP00000431673
MTMTANKNSSITHGAGGTKAPRGTLSRSQSVSPPPVLSPPRSPIYPLSDSETSACRYPSHSSSRVLLKDRHPPAPSPQNPQDPSPDTSPPTCPFKTASFGYLDRSPSACKR

SEQ ID NO: 36604 - protein, 123 aa, Homo sapiens
  REGION 1..123: note = ENSP00000434332
MFGAEGVLPGERALGLQRAEMTMTANKNSSITHGAGGTKAPRGTLSRSQSVSPPPVLSPPRSPIYPLSDSETSACRYPSHSSSRVLLKDRHPPAPSPQNPQDPSPDTSPPTCPFKTASFGYLD

SEQ ID NO: 36605 - protein, 95 aa, Homo sapiens
  REGION 1..95: note = ENSP00000431990
MTMTANKNSSITHGAGGTKAPRGTLSRSQSVSPPPVLSPPRSPIYPLSDSETSACRYPSHSSSRVLLKDRHPPAPSPQNPQDPSPDTSPPTCPFK

SEQ ID NO: 36606 - protein, 83 aa, Homo sapiens
  REGION 1..83: note = ENSP00000435228
MTMTANKNSSITHGAGGTKAPRGTLSRSQSVSPPPVLSPPRSPIYPLSDSETSACRYPSHSSSRVLLKDRHPPAPSPQNPQDP

SEQ ID NO: 36607 - protein, 74 aa, Homo sapiens
  REGION 1..74: note = ENSP00000436748
MTMTANKNSSITHGAGGTKAPRGTLSRSQSVSPPPVLSPPRSPIYPLSDSETSACRYPSHSSSRVLLKDRHPPA

SEQ ID NO: 36608 - protein, 74 aa, Homo sapiens; identical to SEQ ID NO: 36607
  REGION 1..74: note = ENSP00000434930

SEQ ID NO: 36609 - protein, 57 aa, Homo sapiens
  REGION 1..57: note = ENSP00000435925
MTMTANKNSSITHGAGGTKAPRGTLSRSQSVSPPPVLSPPRSPIYPLSDSETSACRY

SEQ ID NO: 36610 - protein, 53 aa, Homo sapiens
  REGION 1..53: note = ENSP00000435180
MTMTANKNSSITHGAGGTKAPRGTLSRSQSVSPPPVLSPPRSPIYPLSDSETS

SEQ ID NO: 36611 - protein, 52 aa, Homo sapiens
  REGION 1..52: note = ENSP00000435562
MTMTANKNSSITHGAGGTKAPRGTLSRSQSVSPPPVLSPPRSPIYPLSDSET

SEQ ID NO: 36612 - protein, 40 aa, Homo sapiens
  REGION 1..40: note = ENSP00000433175
MTMTANKNSSITHGAGGTKAPRGTLSRSQSVSPPPVLSPP

SEQ ID NO: 36613 - protein, 30 aa, Homo sapiens
  REGION 1..30: note = ENSP00000436363
MTMTANKNSSITHGAGGTKAPRGTLSRSQS

SEQ ID NO: 36614 - protein, 26 aa, Homo sapiens
  REGION 1..26: note = ENSP00000436154
MTMTANKNSSITHGAGGTKAPRGTLS

SEQ ID NO: 36615 - protein, 356 aa, Homo sapiens; identical to SEQ ID NO: 36584
  REGION 1..356: note = ENSP00000486899

SEQ ID NO: 36616 - protein, 529 aa, Homo sapiens
  REGION 1..529: note = ENSP00000355273
MKPHLKQWRQRMLFGIFAWGLLFLLIFIYFTDSNPAEPVPSSLSFLETRRLLPVQGKQRAIMGAAHEPSPPGGLDARQALPRAHPAGSFHAGPGDLQKWAQSQDGFEHKEFFSSQVGRKSQSAFYPEDDDYFFAAGQPGWHSHTQGTLGFPSPGEPGPREGAFPAAQVQRRRVKKRHRRQRRSHVLEEGDDGDRLYSSMSRAFLYRLWKGNVSSKMLNPRLQKAMKDYLTANKHGVRFRGKREAGLSRAQLLCQLRSRARVRTLDGTEAPFSALGWRRLVPAVPLSQLHPRGLRSCAVVMSAGAILNSSLGEEIDSHDAVLRFNSAPTRGYEKDVGNKTTIRIINSQILTNPSHHFIDSSLYKDVILVAWDPAPYSANLNLWYKKPDYNLFTPYIQHRQRNPNQPFYILHPKFIWQLWDIIQENTKEKIQPNPPSSGFIGILIMMSMCREVHVYEYIPSVRQTELCHYHELYYDAACTLGAYHPLLYEKLLVQRLNMGTQGDLHRKGKVVLPGFQAVHCPAPSPVIPHS

SEQ ID NO: 36617 - protein, 529 aa, Homo sapiens; identical to SEQ ID NO: 36616
  REGION 1..529: note = ENSP00000386942

SEQ ID NO: 36618 - protein, 95 aa, Homo sapiens
  REGION 1..95: note = ENSP00000355386
  VARIANT 1: note = Any amino acid
XSGFIGILIMMSMCREVHVYEYIPSVRQTELCHYHELYYDAACTLGAYHPLLYEKLLVQRLNMGTQGDLHRKGKVVLPGFQAVHCPAPSPVIPHS

SEQ ID NO: 36619 - protein, 466 aa, Homo sapiens
  REGION 1..466: note = ENSP00000387332
MKPHLKQWRQRMLFGIFAWGLLFLLIFIYFTDSNPAEPVPSSLSFLETRRLLPVQGKQRAIMGAAHEPSPPGGLDARQALPRAHPAGSFHAGPGDLQKWAQSQDGFEHKEFFSSQVGRKSQSAFYPEDDDYFFAAGQPGWHSHTQGTLGFPSPGEPGPREGAFPAAQVQRRRVKKRHRRQRRSHVLEEGDDGDRLYSSMSRAFLYRLWKGNVSSKMLNPRLQKAMKDYLTANKHGVRFRGKREAGLSRAQLLCQLRSRARVRTLDGTEAPFSALGWRRLVPAVPLSQLHPRGLRSCAVVMSAGAILNSSLGEEIDSHDAVLRFNSAPTRGYEKDVGNKTTIRIINSQILTNPSHHFIDSSLYKDVILVAWDPAPYSANLNLWYKKPDYNLFTPYIQHRQRNPNQPFYILHPKFIWQLWDIIQENTKEKIQPNPPSSGFIGSFVKIGHIRACSEPRSRDCTPAWTTE

SEQ ID NO: 36620 - protein, 34 aa, Homo sapiens
  REGION 1..34: note = ENSP00000395581
MKPHLKQWRQRMLFGIFAWGLLFLLIFIYFTDSN

SEQ ID NO: 36621 - protein, 305 aa, Homo sapiens
  REGION 1..305: note = ENSP00000329214
MACILKRKSVIAVSFIAAFLFLLVVRLVNEVNFPLLLNCFGQPGTKWIPFSYTYRRPLRTHYGYINVKTQEPLQLDCDLCAIVSNSGQMVGQKVGNEIDRSSCIWRMNNAPTKGYEEDVGRMTMIRVVSHTSVPLLLKNPDYFFKEANTTIYVIWGPFRNMRKDGNGIVYNMLKKTVGIYPNAQIYVTTEKRMSYCDGVFKKETGKDRVQSGSYLSTGWFTFLLAMDACYGIHVYGMINDTYCKTEGYRKVPYHYYEQGRDECDEYFLHEHAPYGGHRFITEKKVFAKWAKKHRIIFTHPNWTLS

SEQ ID NO: 36622 - protein, 139 aa, Homo sapiens [sequence omitted]

SEQ ID NO: 36623 - protein, 336 aa, Homo sapiens
  REGION 1..336: note = ENSP00000417583
MKTLMRHGLAVCLALTTMCTSLLLVYSSLGGQKERPPQQQQQQQQQQQQASATGSSQPAAESSTQQRPGVPAGPRPLDGYLGVADHKPLKMHCRDCALVTSSGHLLHSRQGSQIDQTECVIRMNDAPTRGYGRDVGNRTSLRVIAHSSIQRILRNRHDLLNVSQGTVFIFWGPSSYMRRDGKGQVYNNLHLLSQVLPRLKAFMITRHKMLQFDELFKQETGKDRKISNTWLSTGWFTMTIALELCDRINVYGMVPPDFCRDPNHPSVPYHYYEPFGPDECTMYLSHERGRKGSHHRFITEKRVFKNWARTFNIHFFQPDWKPESLAINHPENKPVF

SEQ ID NO: 36624 - protein, 236 aa, Homo sapiens
  REGION 1..236: note = ENSP00000436263
MKTLMRHGLAVCLALTTMCTSLLLVYSSLGGQKERPPQQQQQQQQQQQQASATGSSQPAAESSTQQRPGVPAGPRPLDGYLGVADHKPLKMHCRDCALVTSSGHLLHSRQGSQIDQTECVIRMNDAPTRGYGRDVGNRTSLRVIAHSSIQRILRNRHDLLNVSQGTVFIFWGPSSYMRRDGKGQVYNNLHLLSQVLPRLKAFMITRHKMLQFDELFKQETGKDRYPTLGSALAGLQ

SEQ ID NO: 36625 - protein, 2551 aa, Homo sapiens
  REGION 1..2551: note = ENSP00000373539
MMLQHLVIFCLGLVVQNFCSPAETTGQARRCDRKSLLTIRTECRSCALNLGVKCPDGYTMITSGSVGVRDCRYTFEVRTYSLSLPGCRHICRKDYLQPRCCPGRWGPDCIECPGGAGSPCNGRGSCAEGMEGNGTCSCQEGFGGTACETCADDNLFGPSCSSVCNCVHGVCNSGLDGDGTCECYSAYTGPKCDKPIPECAALLCPENSRCSPSTEDENKLECKCLPNYRGDGKYCDPINPCLRKICHPHAHCTYLGPNRHSCTCQEGYRGDGQVCLPVDPCQINFGNCPTKSTVCKYDGPGQSHCECKEHYQNFVPGVGCSMTDICKSDNPCHRNANCTTVAPGRTECICQKGYVGDGLTCYGNIMERLRELNTEPRGKWQGRLTSFISLLDKAYAWPLSKLGPFTVLLPTDKGLKGFNVNELLVDNKAAQYFVKLHIIAGQMNIEYMNNTDMFYTLTGKSGEIFNSDKDNQIKLKLHGGKKKVKIIQGDIIASNGLLHILDRAMDKLEPTFESNNEQTIMTMLQPRYSKFRSLLEETNLGHALDEDGVGGPYTIFVPNNEALNNMKDGTLDYLLSPEGSRKLLELVRYHIVPFTQLEVATLISTPHIRSMANQLIQFNTTDNGQILANDVAMEEIEITAKNGRIYTLTGVLIPPSIVPILPHRCDETKREMKLGTCVSCSLVYWSRCPANSEPTALFTHRCVYSGRFGSLKSGCARYCNATVKIPKCCKGFYGPDCNQCPGGFSNPCSGNGQCADSLGGNGTCICEEGFQGSQCQFCSDPNKYGPRCNKKCLCVHGTCNNRIDSDGACLTGTCRDGSAGRLCDKQTSACGPYVQFCHIHATCEYSNGTASCICKAGYEGDGTLCSEMDPCTGLTPGGCSRNAECIKTGTGTHTCVCQQGWTGNGRDCSEINNCLLPSAGGCHDNASCLYVGPGQNECECKKGFRGNGIDCEPITSCLEQTGKCHPLASCQSTSSGVWSCVCQEGYEGDGFLCYGNAAVELSFLSEAAIFNRWINNASLQPTLSATSNLTVLVPSQQATEDMDQDEKSFWLSQSNIPALIKYHMLLGTYRVADLQTLSSSDMLATSLQGNFLHLAKVDGNITIEGASIVDGDNAATNGVIHIINKVLVPQRRLTGSLPNLLMRLEQMPDYSIFRGYIIQYNLANAIEAADAYTVFAPNNNAIENYIREKKVLSLEEDVLRYHVVLEEKLLKNDLHNGMHRETMLGFSYFLSFFLHNDQLYVNEAPINYTNVATDKGVIHGLGKVLEIQKNRCDNNDTTIIRGRCRTCSSELTCPFGTKSLGNEKRRCIYTSYFMGRRTLFIGCQPKCVRTVITRECCAGFFGPQCQPCPGNAQNVCFGNGICLDGVNGTGVCECGEGFSGTACETCTEGKYGIHCDQACSCVHGRCNQGPLGDGSCDCDVGWRGVHCDNATTEDNCNGTCHTSANCLTNSDGTASCKCAAGFQGNGTICTAINACEISNGGCSAKADCKRTTPGRRVCTCKAGYTGDGIVCLEINPCLENHGGCDKNAECTQTGPNQAACNCLPAYTGDGKVCTLINVCLTKNGGCSEFAICNHTGQVERTCTCKPNYIGDGFTCRGSIYQELPKNPKTSQYFFQLQEHFVKDLVGPGPFTVFAPLSAAFDEEARVKDWDKYGLMPQVLRYHVVACHQLLLENLKLISNATSLQGEPIVISVSQSTVYINNKAKIISSDIISTNGIVHIIDKLLSPKNLLITPKDNSGRILQNLTTLATNNGYIKFSNLIQDSGLLSVITDPIHTPVTLFWPTDQALHALPAEQQDFLFNQDNKDKLKEYLKFHVIRDAKVLAVDLPTSTAWKTLQGSELSVKCGAGRDIGDLFLNGQTCRIVQRELLFDLGVAYGIDCLLIDPTLGGRCDTFTTFDASGECGSCVNTPSCPRWSKPKGVKQKCLYNLPFKRNLEGCRERCSLVIQIPRCCKGYFGRDCQACPGGPDAPCNNRGVCLDQYSATGECKCNTGFNGTACEMCWPGRFGPDCLPCGCSDHGQCDDGITGSGQCLCETGWTGPSCDTQAVLPAVCTPPCSAHATCKENNTCECNLDYEGDGITCTVVDFCKQDNGGCAKVARCSQKGTKVSCSCQKGYKGDGHSCTEIDPCADGLNGGCHEHATCKMTGPGKHKCECKSHYVGDGLNCEPEQLPIDRCLQDNGQCHADAKCVDLHFQDTTVGVFHLRSPLGQYKLTFDKAREACANEAATMATYNQLSYAQKAKYHLCSAGWLETGRVAYPTAFASQNCGSGVVGIVDYGPRPNKSEMWDVFCYRMKDVNCTCKVGYVGDGFSCSGNLLQVLMSFPSLTNFLTEVLAYSNSSARGRAFLEHLTDLSIRGTLFVPQNSGLGENETLSGRDIEHHLANVSMFFYNDLVNGTTLQTRLGSKLLITASQDPLQPTETRFVDGRAILQWDIFASNGIIHVISRPLKAPPAPVTLTHTGLGAGIFFAIILVTGAVALAAYSYFRINRRTIGFQHFESEEDINVAALGKQQPENISNPLYESTTSAPPEPSYDPFTDSEERQLEGNDPLRTL

SEQ ID NO: 36626 - protein, 33 aa, Homo sapiens
  REGION 1..33: note = ENSP00000449282
QKNRCDNNDTTIIRGRCRTCSSELTCPFGTKSL

SEQ ID NO: 36627 - protein, 135 aa, Homo sapiens
  REGION 1..135: note = ENSP00000446629
EDINVAALGKQQPENISNPLYESTTSAPPEPSYDPFTMKKLQPSWDDLSWATQLQAGETKTGGPTPSPSCLPTQGSSTNKHAQHIRVHSAQGESCLRPVATRKIQLGLNTQNALPPYNPLFSRTLKNGSLRAMTP

SEQ ID NO: 36628 - protein, 402 aa, Homo sapiens
  REGION 1..402: note = ENSP00000273183
MIPPSSPREDGVDGLPKEAVGAEQPPSPASTSSQESKLQKLKRSLSFKTKSLRSKSADNFFQRTNSEDMKLQAHMVAEISPSSSPLPAPGSLTSTPARAGLHPGGKAHAFQEYIFKKPTFCDVCNHMIVGTNAKHGLRCKACKMSIHHKCTDGLAPQRCMGKLPKGFRRYYSSPLLIHEQFGCIKEVMPIACGNKVDPVYETLRFGTSLAQRTKKGSSGSGSDSPHRTSTSDLVEVPEEANGPGGGYDLRKRSNSVFTYPENGTDDFRDPAKNINHQGSLSKDPLQMNTYVALYKFVPQENEDLEMRPGDIITLLEDSNEDWWKGKIQDRIGFFPANFVQRLQQNEKIFRCVRTFIGCKEQGQITLKENQICVSSEEEQDGFIRVLSGKKKGLIPLDVLENI

SEQ ID NO: 36629 - protein, 341 aa, Homo sapiens
  REGION 1..341: note = ENSP00000393713
MIPPSSPREDGVDGLPKEAVGAEQPPSPASTSSQESKLQKLKRSLSFKTKSLRSKSADNFFQRTNSEDMKLQAHMVAEISPSSSPLPAPGSLTSTPARAGLHPGGKAHAFQEYIFKKPTFCDVCNHMIVACGNKVDPVYETLRFGTSLAQRTKKGSSGSGSDSPHRTSTSDLVEVPEEANGPGGGYDLRKRSNSVFTYPENGTDDFRDPAKNINHQGSLSKDPLQMNTYVALYKFVPQENEDLEMRPGDIITLLEDSNEDWWKGKIQDRIGFFPANFVQRLQQNEKIFRCVRTFIGCKEQGQITLKENQICVSSEEEQDGFIRVLSGKKKGLIPLDVLENI

SEQ ID NO: 36630 - protein, 51 aa, Homo sapiens
  REGION 1..51: note = ENSP00000397521
MIPPSSPREDGVDGLPKEAVGAEQPPSPASTSSQESKEQMLSMDCAAKPVR

SEQ ID NO: 36631 - protein, 252 aa, Homo sapiens
  REGION 1..252: note = ENSP00000398403
MIPPSSPREDGVDGLPKEAVGAEQPPSPASTSSQESKTKSLRSKSADNFFQRTNSEDMKLQAHMVAEISPSSSPLPAPGSLTSTPARAGLHPGGKAHAFQEYIFKKPTFCDVCNHMIVACGNKVDPVYETLRFGTSLAQRTKKGSSGSGSDSPHRTSTSDLVEVPEEANGPGGGYDLRKRSNSVFTYPENGTDDFRDPAKNINHQGSLSKDPLQMNTYVALYKFVPQENEDLEMRPGDIITLLEDSNEDWWK

SEQ ID NO: 36632 - protein, 411 aa, Homo sapiens
  REGION 1..411: note = ENSP00000327509
MTEMSEKENEPDDAATHSPPGTVSALQETKLQRFKRSLSLKTILRSKSLENFFLRSGSELKCPTEVLLTPPTPLPPPSPPPTASDRGLATPSPSPCPVPRPLAALKPVRLHSFQEHVFKRASPCELCHQLIVGNSKQGLRCKMCKVSVHLWCSEEISHQQCPGKTSTSFRRNFSSPLLVHEPPPVCATSKESPPTGDSGKVDPVYETLRYGTSLALMNRSSFSSTSESPTRSLSERDELTEDGEGSIRSSEEGPGDSASPVFTAPAESEGPGPEEKSPGQQLPKATLRKDVGPMYSYVALYKFLPQENNDLALQPGDRIMLVDDSNEDWWKGKIGDRVGFFPANFVQRVRPGENVWRCCQPFSGNKEQGYMSLKENQICVGVGRSKDADGFIRVSSGKKRGLVPVDALTEI

SEQ ID NO: 36633 - protein, 148 aa, Homo sapiens
  REGION 1..148: note = ENSP00000463299
MTEMSEKENEPDDAATHSPPGTVSALQETKLQRFKRSLSLKTILRSKSLENFFLRSGSELKCPTEETPNRACDVRCAKSASTSGALRRSPTSNAQARRPPPSAATSVPLSWCMSRHQSVPQAKSPHPLGTVGRWTLSTRPCAMAPPWH

SEQ ID NO: 36634 - protein, 1225 aa, Homo sapiens
  REGION 1..1225: note = ENSP00000400359
MSSPLQRAVGDTKRALSASSSSSASLPFDDRDSNHTSEGNGDSLLADEDTDFEDSLNRNVKKRAAKRPPKTTPVAKHPKKGSRVVHRHSRKQSEPPANDLFNAVKAAKSDMQSLVDEWLDSYKQDQDAGFLELVNFFIQSCGCKGIVTPEMFKKMSNSEIIQHLTEQFNEDSGDYPLIAPGPSWKKFQGSFCEFVRTLVCQCQYSLLYDGFPMDDLISLLTGLSDSQVRAFRHTSTLAAMKLMTSLVKVALQLSVHQDNNQRQYEAERNKGPGQRAPERLESLLEKRKELQEHQEEIEGMMNALFRGVFVHRYRDVLPEIRAICIEEIGCWMQSYSTSFLTDSYLKYIGWTLHDKHREVRLKCVKALKGLYGNRDLTTRLELFTSRFKDRMVSMVMDREYDVAVEAVRLLILILKNMEGVLTDADCESVYPVVYASHRGLASAAGEFLYWKLFYPECEIRMMGGREQRQSPGAQRTFFQLLLSFFVESELHDHAAYLVDSLWDCAGARLKDWEGLTSLLLEKDQNLGDVQESTLIEILVSSARQASEGHPPVGRVTGRKGLTSKERKTQADDRVKLTEHLIPLLPQLLAKFSADAEKVTPLLQLLSCFDLHIYCTGRLEKHLELFLQQLQEVVVKHAEPAVLEAGAHALYLLCNPEFTFFSRADFARSQLVDLLTDRFQQELEELLQSSFLDEDEVYNLAATLKRLSAFYNTHDLTRWELYEPCCQLLQKAVDTGEVPHQVILPALTLVYFSILWTLTHISKSDASQKQLSSLRDRMVAFCELCQSCLSDVDTEIQEQAFVLLSDLLLIFSPQMIVGGRDFLRPLVFFPEATLQSELASFLMDHVFIQPGDLGSGDSQEDHLQIERLHQRRRLLAGFCKLLLYGVLEMDAASDVFKHYNKFYNDYGDIIKETLTRARQIDRSHCSRILLLSLKQLYTELLQEHGPQGLNELPAFIEMRDLARRFALSFGPQQLQNRDLVVMLHKEGIQFSLSELPPAGSSNQPPNLAFLELLSEFSPRLFHQDKQLLLSYLEKCLQHVSQAPGHPWGPVTTYCHSLSPVENTAETSPQVLPSSKRRRVEGPAKPNREDVSSSQEESLQLNSIPPTPTLTSTAVKSRQPLWGLKEMEEEDGSELDFAQGQPVAGTERSRFLGPQYFQTPHNPSGPGLGNQLMRLSLMEEDEEEELEIQDESNEERQDTDMQASSYSSTSERGLDLLDSTELDIEDF

SEQ ID NO: 36635 - protein, 1167 aa, Homo sapiens
  REGION 1..1167: note = ENSP00000377586
MSSPLQRAVGDTKRALSASSSSSASLPFDDRDSNHTSEGNGDSLLADEDTDFEDSLNRNVKKRAAKRPPKTTPVAKHPKKGSRVVHRHSRKQSEPPANDLFNAVKAAKSDMQDSGDYPLIAPGPSWKKFQGSFCEFVRTLVCQCQYSLLYDGFPMDDLISLLTGLSDSQVRAFRHTSTLAAMKLMTSLVKVALQLSVHQDNNQRQYEAERNKGPGQRAPERLESLLEKRKELQEHQEEIEGMMNALFRGVFVHRYRDVLPEIRAICIEEIGCWMQSYSTSFLTDSYLKYIGWTLHDKHREVRLKCVKALKGLYGNRDLTTRLELFTSRFKDRMVSMVMDREYDVAVEAVRLLILILKNMEGVLTDADCESVYPVVYASHRGLASAAGEFLYWKLFYPECEIRMMGGREQRQSPGAQRTFFQLLLSFFVESELHDHAAYLVDSLWDCAGARLKDWEGLTSLLLEKDQNLGDVQESTLIEILVSSARQASEGHPPVGRVTGRKGLTSKERKTQADDRVKLTEHLIPLLPQLLAKFSADAEKVTPLLQLLSCFDLHIYCTGRLEKHLELFLQQLQEVVVKHAEPAVLEAGAHALYLLCNPEFTFFSRADFARSQLVDLLTDRFQQELEELLQSSFLDEDEVYNLAATLKRLSAFYNTHDLTRWELYEPCCQLLQKAVDTGEVPHQVILPALTLVYFSILWTLTHISKSDASQKQLSSLRDRMVAFCELCQSCLSDVDTEIQEQAFVLLSDLLLIFSPQMIVGGRDFLRPLVFFPEATLQSELASFLMDHVFIQPGDLGSGDSQEDHLQIERLHQRRRLLAGFCKLLLYGVLEMDAASDVFKHYNKFYNDYGDIIKETLTRARQIDRSHCSRILLLSLKQLYTELLQEHGPQGLNELPAFIEMRDLARRFALSFGPQQLQNRDLVVMLHKEGIQFSLSELPPAGSSNQPPNLAFLELLSEFSPRLFHQDKQLLLSYLEKCLQHVSQAPGHPWGPVTTYCHSLSPVENTAETSPQVLPSSKRRRVEGPAKPNREDVSSSQEESLQLNSIPPTPTLTSTAVKSRQPLWGLKEMEEEDGSELDFAQGQPVAGTERSRFLGPQYFQTPHNPSGPGLGNQLMRLSLMEEDEEEELEIQDESNEERQDTDMQASSYSSTSERGLDLLDSTELDIEDF

SEQ ID NO: 36636 - protein, 144 aa, Homo sapiens
  REGION 1..144: note = ENSP00000409283
MSSPLQRAVGDTKRALSASSSSSASLPFDDRDSNHTSEGNGDSLLADEDTDFEDSLNRNVKKRAAKRPPKTTPVAKHPKKGSRVVHRHSRKQSEPPANDLFNAVKAAKSDMQSLVDEWLDSYKQDQDAGFLELVNFFIQSCGCK

SEQ ID NO: 36637 - protein, 1225 aa, Homo sapiens; identical to SEQ ID NO: 36634
  REGION 1..1225: note = ENSP00000319318

SEQ ID NO: 36638 - protein, 112 aa, Homo sapiens
  REGION 1..112: note = ENSP00000407884
MSSPLQRAVGDTKRALSASSSSSASLPFDDRDSNHTSEGNGDSLLADEDTDFEDSLNRNVKKRAAKRPPKTTPVAKHPKKGSRVVHRHSRKQSEPPANDLFNAVKAAKSDMQ

SEQ ID NO: 36639 - protein, 188 aa, Homo sapiens
  REGION 1..188: note = ENSP00000397067
MSSPLQRAVGDTKRALSASSSSSASLPFDDRDSNHTSEGNGDSLLADEDTDFEDSLNRNVKKRAAKRPPKTTPVAKHPKKGSRVVHRHSRKQSEPPANDLFNAVKAAKSDMQDSGDYPLIAPGPSWKKFQGSFCEFVRTLVCQCQYSLLYDGFPMDDLISLLTGLSDSQVRAFRHTSTLAAMKLMTSL

SEQ ID NO: 36640 - protein, 184 aa, Homo sapiens
  REGION 1..184: note = ENSP00000395039
GHPWGPVTTYCHSLSPVENTAETSPQVLPSSKRRRVEGPAKPNREDVSSSQEESLQLNSIPPTPTLTSTAVKSRQPLWGLKEMEEEDGSELDFAQGSQPVAGTERSRFLGPQYFQTPHNPSGPGLGNQLMRLSLMEEDEEEELEIQDESNEERQDTDMQASSYSSTSERGLDLLDSTELDIEDF

SEQ ID NO: 36641 - protein, 172 aa, Homo sapiens
  REGION 1..172: note = ENSP00000393790
PSSKRRRVEGPAKPNREDVSSSQEESLQLNSIPPTPTLTSTAVKSRQPLWGLKEMEEEDGSELDFAQGSQPVAGTERSRFLGPQYFQTPHNPSGPGLGNQLMRLSLMEEDEEEELEIQDESNEERQDTDMQASSYSSTSERGLDLLDSTELDIEITESLPLLGKSPHPYNSR

SEQ ID NO: 36642 - protein, 1167 aa, Homo sapiens; identical to SEQ ID NO: 36635
  REGION 1..1167: note = ENSP00000484098

SEQ ID NO: 36643 - protein, 1226 aa, Homo sapiens
  REGION 1..1226: note = ENSP00000477973
MSSPLQRAVGDTKRALSASSSSSASLPFDDRDSNHTSEGNGDSLLADEDTDFEDSLNRNVKKRAAKRPPKTTPVAKHPKKGSRVVHRHSRKQSEPPANDLFNAVKAAKSDMQSLVDEWLDSYKQDQDAGFLELVNFFIQSCGCKGIVTPEMFKKMSNSEIIQHLTEQFNEDSGDYPLIAPGPSWKKFQGSFCEFVRTLVCQCQYSLLYDGFPMDDLISLLTGLSDSQVRAFRHTSTLAAMKLMTSLVKVALQLSVHQDNNQRQYEAERNKGPGQRAPERLESLLEKRKELQEHQEEIEGMMNALFRGVFVHRYRDVLPEIRAICIEEIGCWMQSYSTSFLTDSYLKYIGWTLHDKHREVRLKCVKALKGLYGNRDLTTRLELFTSRFKDRMVSMVMDREYDVAVEAVRLLILILKNMEGVLTDADCESVYPVVYASHRGLASAAGEFLYWKLFYPECEIRMMGGREQRQSPGAQRTFFQLLLSFFVESELHDHAAYLVDSLWDCAGARLKDWEGLTSLLLEKDQNLGDVQESTLIEILVSSARQASEGHPPVGRVTGRKGLTSKERKTQADDRVKLTEHLIPLLPQLLAKFSADAEKVTPLLQLLSCFDLHIYCTGRLEKHLELFLQQLQEVVVKHAEPAVLEAGAHALYLLCNPEFTFFSRADFARSQLVDLLTDRFQQELEELLQSSFLDEDEVYNLAATLKRLSAFYNTHDLTRWELYEPCCQLLQKAVDTGEVPHQVILPALTLVYFSILWTLTHISKSDASQKQLSSLRDRMVAFCELCQSCLSDVDTEIQEQAFVLLSDLLLIFSPQMIVGGRDFLRPLVFFPEATLQSELASFLMDHVFIQPGDLGSGDSQEDHLQIERLHQRRRLLAGFCKLLLYGVLEMDAASDVFKHYNKFYNDYGDIIKETLTRARQIDRSHCSRILLLSLKQLYTELLQEHGPQGLNELPAFIEMRDLARRFALSFGPQQLQNRDLVVMLHKEGIQFSLSELPPAGSSNQPPNLAFLELLSEFSPRLFHQDKQLLLSYLEKCLQHVSQAPGHPWGPVTTYCHSLSPVENTAETSPQVLPSSKRRRVEGPAKPNREDVSSSQEESLQLNSIPPTPTLTSTAVKSRQPLWGLKEMEEEDGSELDFAQGSQPVAGTERSRFLGPQYFQTPHNPSGPGLGNQLMRLSLMEEDEEEELEIQDESNEERQDTDMQASSYSSTSERGLDLLDSTELDIEDF

SEQ ID NO: 36644 - protein, 436 aa, Homo sapiens
  REGION 1..436: note = ENSP00000360994
MDQPFTVNSLKKLAAMPDHTDVSLSPEERVRALSKLGCNITISEDITPRRYFRSGVEMERMASVYLEEGNLENAFVLYNKFITLFVEKLPNHRDYQQCAVPEKQDIMKKLKEIAFPRTDELKNDLLKKYNVEYQEYLQSKNKYKAEILKKLEHQRLIEAERKRIAQMRQQQLESEQFLFFEDQLKKQELARGQMRSQQTSGLSEQIDGSALSCFSTHQNNSLLNVFADQPNKSDATNYASHSPPVNRALTPAATLSAVQNLVVEGLRCVVLPEDLCHKFLQLAESNTVRGIETCGILCGKLTHNEFTITHVIVPKQSAGPDYCDMENVEELFNVQDQHDLLTLGWIHTHPTQTAFLSSVDLHTHCSYQLMLPEAIAIVCSPKHKDTGIFRLTNAGMLEVSACKKKGFHPHTKEPRLFSICKHVLVKDIKIIVLDLR

SEQ ID NO: 36645 - protein, 461 aa, Homo sapiens
  REGION 1..461: note = ENSP00000360995
MDQPFTVNSLKKLAAMPDHTDVSLSPEERVRALSKLGCNITISEDITPRRYFRSGVEMERMASVYLEEGNLENAFVLYNKFITLFVEKLPNHRDYQQCAVPEKQDIMKKLKEIAFPRTDELKNDLLKKYNVEYQEYLQSKNKYKAEILKKLEHQRLIEAERKRIAQMRQQQLESEQFLFFEDQLKKQELARGQMRSQQTSGLSEQIDGSALSCFSTHQNNSLLNVFADQPNKSDATNYASHSPPVNRALTPAATLSAVQNLVVEGLRCVVLPEDLCHKFLQLAESNTVRGIETCGILCGKLTHNEFTITHVIVPKQSAGPDYCDMENVEELFNVQDQHDLLTLGWIHTHPTQTAFLSSVDLHTHCSYQLMLPEAIAIVCSPKHKDTGIFRLTNAGMLEVSACKKKGFHPHTKEPRLFSIQKFLSGIISGTALEMEPLKIGYGPNGFPLLGISRSSSPSEQL

SEQ ID NO: 36646 - protein, 436 aa, Homo sapiens; identical to SEQ ID NO: 36644
  REGION 1..436: note = ENSP00000360992

SEQ ID NO: 36647 - protein, 270 aa, Homo sapiens
  REGION 1..270: note = ENSP00000360990
MRQQQLESEQFLFFEDQLKKQELARGQMRSQQTSGLSEQIDGSALSCFSTHQNNSLLNVFADQPNKSDATNYASHSPPVNRALTPAATLSAVQNLVVEGLRCVVLPEDLCHKFLQLAESNTVRGIETCGILCGKLTHNEFTITHVIVPKQSAGPDYCDMENVEELFNVQDQHDLLTLGWIHTHPTQTAFLSSVDLHTHCSYQLMLPEAIAIVCSPKHKDTGIFRLTNAGMLEVSACKKKGFHPHTKEPRLFSICKHVLVKDIKIIVLDLR

SEQ ID NO: 36648 - protein, 1113 aa, Homo sapiens
  REGION 1..1113: note = ENSP00000338785
MFSQVPRTPASGCYYLNSMTPEGQEMYLRFDQTTRRSPYRMSRILARHQLVTKIQQEIEAKEACDWLRAAGFPQYAQLYEDSQFPINIVAVKNDHDFLEKDLVEPLCRRLNTLNKCASMKLDVNFQRKKGDDSDEEDLCISNKWTFQRTSRRWSRVDDLYTLLPRGDRNGSPGGTGMRNTTSSESVLTDLSEPEVCSIHSESSGGSDSRSQPGQCCTDNPVMLDAPLVSSSLPQPPRDVLNHPFHPKNEKPTRARAKSFLKRMETLRGKGAHGRHKGSGRTGGLVISGPMLQQEPESFKAMQCIQIPNGDLQNSPPPACRKGLPCSGKSSGESSPSEHSSSGVSTPCLKERKCHEANKRGGMYLEDLDVLAGTALPDAGDQSRMHEFHSQENLVVHIPKDHKPGTFPKALSIESLSPTDSSNGVNWRTGSISLGREQVPGAREPRLMASCHRASRVSIYDNVPGSHLYASTGDLLDLEKDDLFPHLDDILQHVNGLQEVVDDWSKDVLPELQTHDTLVGEPGLSTFPSPNQITLDFEGNSVSEGRTTPSDVERDVTSLNESEPPGVRDRRDSGVGASLTRPNRRLRWNSFQLSHQPRPAPASPHISSQTASQLSLLQRFSLLRLTAIMEKHSMSNKHGWTWSVPKFMKRMKVPDYKDKAVFGVPLIVHVQRTGQPLPQSIQQALRYLRSNCLDQVGLFRKSGVKSRIHALRQMNENFPENVNYEDQSAYDVADMVKQFFRDLPEPLFTNKLSETFLHIYQYVSKEQRLQAVQAAILLLADENREVLQTLLCFLNDVVNLVEENQMTPMNLAVCLAPSLFHLNLLKKESSPRVIQKKYATGKPDQKDLNENLAAAQGLAHMIMECDRLFEVPHELVAQSRNSYVEAEIHVPTLEELGTQLEESGATFHTYLNHLIQGLQKEAKEKFKGWVTCSSTDNTDLAFKKVGDGNPLKLWKASVEVEAPPSVVLNRVLRERHLWDEDFVQWKVVETLDRQTEIYQYVLNSMAPHPSRDFVVLRTWKTDLPKGMCTLVSLSVEHEEAQLLGGVRAVVMDSQYLIEPCGSGKSRLTHICRIDLKGHSPEWYSKGFGHLCAAEVARIRNSFQPLIAEGPETKI

SEQ ID NO: 36649 - protein, 1105 aa, Homo sapiens
  REGION 1..1105: note = ENSP00000255486
MLEPSSVLHANVNQAPLWCLVLRWCRECKDTVCGGKQKSRVNHTFQRREIEAKEACDWLRAAGFPQYAQLYEDSQFPINIVAVKNDHDFLEKDLVEPLCRRLNTLNKCASMKLDVNFQRKKGDDSDEEDLCISNKWTFQRTSRRWSRVDDLYTLLPRGDRNGSPGGTGMRNTTSSESVLTDLSEPEVCSIHSESSGGSDSRSQPGQCCTDNPVMLDAPLVSSSLPQPPRDVLNHPFHPKNEKPTRARAKSFLKRMETLRGKGAHGRHKGSGRTGGLVISGPMLQQEPESFKAMQCIQIPNGDLQNSPPPACRKGLPCSGKSSGESSPSEHSSSGVSTPCLKERKCHEANKRGGMYLEDLDVLAGTALPDAGDQSRMHEFHSQENLVVHIPKDHKPGTFPKALSIESLSPTDSSNGVNWRTGSISLGREQVPGAREPRLMASCHRASRVSIYDNVPGSHLYASTGDLLDLEKDDLFPHLDDILQHVNGLQEVVDDWSKDVLPELQTHDTLVGEPGLSTFPSPNQITLDFEGNSVSEGRTTPSDVERDVTSLNESEPPGVRDRRDSGVGASLTRPNRRLRWNSFQLSHQPRPAPASPHISSQTASQLSLLQRFSLLRLTAIMEKHSMSNKHGWTWSVPKFMKRMKVPDYKDKAVFGVPLIVHVQRTGQPLPQSIQQALRYLRSNCLDQVGLFRKSGVKSRIHALRQMNENFPENVNYEDQSAYDVADMVKQFFRDLPEPLFTNKLSETFLHIYQYVSKEQRLQAVQAAILLLADENREVLQTLLCFLNDVVNLVEENQMTPMNLAVCLAPSLFHLNLLKKESSPRVIQKKYATGKPDQKDLNENLAAAQGLAHMIMECDRLFEVPHELVAQSRNSYVEAEIHVPTLEELGTQLEESGATFHTYLNHLIQGLQKEAKEKFKGWVTCSSTDNTDLAFKKVGDGNPLKLWKASVEVEAPPSVVLNRVLRERHLWDEDFVQWKVVETLDRQTEIYQYVLNSMAPHPSRDFVVLRTWKTDLPKGMCTLVSLSVEHEEAQLLGGVRAVVMDSQYLIEPCGSGKSRLTHICRIDLKGHSPEWYSKGFGHLCAAEVARIRNSFQPLIAEGPETKI

SEQ ID NO: 36650 - protein, 995 aa, Homo sapiens
  REGION 1..995: note = ENSP00000382300
MKLDVNFQRKKGDDSDEEDLCISNKWTFQRTSRRWSRVDDLYTLLPRGDRNGSPGGTGMRNTTSSESVLTDLSEPEVCSIHSESSGGSDSRSQPGQCCTDNPVMLDAPLVSSSLPQPPRDVLNHPFHPKNEKPTRARAKSFLKRMETLRGKGAHGRHKGSGRTGGLVISGPMLQQEPESFKAMQCIQIPNGDLQNSPPPACRKGLPCSGKSSGESSPSEHSSSGVSTPCLKERKCHEANKRGGMYLEDLDVLAGTALPDAGDQSRMHEFHSQENLVVHIPKDHKPGTFPKALSIESLSPTDSSNGVNWRTGSISLGREQVPGAREPRLMASCHRASRVSIYDNVPGSHLYASTGDLLDLEKDDLFPHLDDILQHVNGLQEVVDDWSKDVLPELQTHDTLVGEPGLSTFPSPNQITLDFEGNSVSEGRTTPSDVERDVTSLNESEPPGVRDRRDSGVGASLTRPNRRLRWNSFQLSHQPRPAPASPHISSQTASQLSLLQRFSLLRLTAIMEKHSMSNKHGWTWSVPKFMKRMKVPDYKDKAVFGVPLIVHVQRTGQPLPQSIQQALRYLRSNCLDQVGLFRKSGVKSRIHALRQMNENFPENVNYEDQSAYDVADMVKQFFRDLPEPLFTNKLSETFLHIYQYVSKEQRLQAVQAAILLLADENREVLQTLLCFLNDVVNLVEENQMTPMNLAVCLAPSLFHLNLLKKESSPRVIQKKYATGKPDQKDLNENLAAAQGLAHMIMECDRLFEVPHELVAQSRNSYVEAEIHVPTLEELGTQLEESGATFHTYLNHLIQGLQKEAKEKFKGWVTCSSTDNTDLAFKKVGDGNPLKLWKASVEVEAPPSVVLNRVLRERHLWDEDFVQWKVVETLDRQTEIYQYVLNSMAPHPSRDFVVLRTWKTDLPKGMCTLVSLSVEHEEAQLLGGVRAVVMDSQYLIEPCGSGKSRLTHICRIDLKGHSPEWYSKGFGHLCAAEVARIRNSFQPLIAEGPETKI

SEQ ID NO: 36651 - protein, 606 aa, Homo sapiens
  REGION 1..606: note = ENSP00000456233
MTSKRKPCQTQLRRSISEQLRDSTARAWDLLWKNVRERRLAEIEAKEACDWLRAAGFPQYAQLYEDSQFPINIVAVKNDHDFLEKDLVEPLCRRLNTLNKCASMKLDVNFQRKKGDDSDEEDLCISNKWTFQRTSRRWSRVDDLYTLLPRGDRNGSPGGTGMRNTTSSESVLTDLSEPEVCSIHSESSGGSDSRSQPGQCCTDNPVMLDAPLVSSSLPQPPRDVLNHPFHPKNEKPTRARAKSFLKRMETLRGKGAHGRHKGSGRTGGLVISGPMLQQEPESFKAMQCIQIPNGDLQNSPPPACRKGLPCSGKSSGESSPSEHSSSGVSTPCLKERKCHEANKRGGMYLEDLDVLAGTALPDAGDQSRMHEFHSQENLVVHIPKDHKPGTFPKALSIESLSPTDSSNGVNWRTGSISLGREQVPGAREPRLMASCHRASRVSIYDNVPGSHLYASTGDLLDLEKDDLFPHLDDILQHVNGLQEVVDDWSKDVLPELQTHDTLVGEPGLSTFPSPNQITLDFEGNSVSEGRTTPSDVERDVTSLNESEPPGVRDRRDSGVGASLTRPNRRLRWNSFQLSHQPRPAPASPHISSQTASQLSLLQRFSL

SEQ ID NO: 36652 - protein, 63 aa, Homo sapiens
  REGION 1..63: note = ENSP00000457840
MTSKRKPCQTQLRRSISEQLRDSTARAWDLLWKNVRERRLAGLSLELGSDHHMGQKKVLEKKV

SEQ ID NO: 36653 - protein, 52 aa, Homo sapiens
  REGION 1..52: note = ENSP00000428031
MPLLDVFWSCFRKVKCFPLLQVKKNAEAEAKRACEWLQATGFPQYVQLFEGG

SEQ ID NO: 36654 - protein, 1103 aa, Homo sapiens
  REGION 1..1103: note = ENSP00000363727
MPLLDVFWSCFRKVKCFPLLQVKKNAEAEAKRACEWLQATGFPQYVQLFEEGSFPLDIGSVKKNHGFLDEDSLGALCRRLMTLNNCASMKLEVHFQSKQNEDSEEEEQCTISSHWAFQQESKCWSPMGSSDLLAPPSPGLPATSSCESVLTELSATSLPVITVSLPPEPADLPLPGRAPSSSDRPLLSPTQGQEGPQDKAKKRHRNRSFLKHLESLRRKEKSGSQQAEPKHSPATSEKVSKASSFRSCRGFLSAGFYRAKNWAATSAGGSGANTRKAWEAWPVASFRHPQWTHRGDCLVHVPGDHKPGTFPRSLSIESLCPEDGHRLADWQPGRRWGCEGRRGSCGSTGSHASTYDNLPELYPAEPVMVGAEAEDEDDEESGGSYAHLDDILQHVWGLQQRVELWSRAMYPDLGPGDEEEEEATSSVEIATVEVKCQAEALSQMEVPAHGESPAWAQAEVQPAVLAPAQAPAEAEPVAQEEAEAPAPAPAPAPAQDSEQEAHSGGEPTFASSLSVEEGHSISDTVASSSELDSSGNSMNEAEAAGPLAGLQASMPRERRDSGVGASLTRPCRKLRWHSFQNSHRPSLNSESLEINRQFAGQINLLHKGSLLRLTAFMEKYTVPHKQGWVWSMPKFMRRNKTPDYRGQHVFGVPPLIHVQRTGQPLPQSIQQAMRYLRSQCLDQVGIFRKSGVKSRIQNLRQMNETSPDNVCYEGQSAYDVADLLKQYFRDLPEPIFTSKLTTTFLQIYQLLPKDQWLAAAQAATLLLPDENREVLQTLLYFLSDIASAEENQMTAGNLAVCLAPSIFHLNVSKKDSPSPRIKSKRSLIGRPGPRDLSDNMAATQGLSHMISDCKKLFQVPQDMVLQLCSSYSAAELSPPGPALAELRQAQAAGVSLSLYMEENIQDLLRDAAERFKGWMSVPGPQHTELACRKAPDGHPLRLWKASTEVAAPPAVVLHRVLRERALWDEDLLRAQVLEALMPGVELYHYVTDSMAPHPCRDFVVLRMWRSDLPRGGCLLVSQSLDPEQPVPESGVRALMLTSQYLMEPCGLGRSRLTHICRADLRGRSPDWYNKVFGHLCAMEVAKIRDSFPTLQAAGPETKL

SEQ ID NO: 36655 - protein, 1023 aa, Homo sapiens
  REGION 1..1023: note = ENSP00000363725
MTLNNCASMKLEVHFQSKQNEDSEEEEQCTISSHWAFQQESKCWSPMGSSDLLAPPSPGLPATSSCESVLTELSATSLPVITVSLPPEPADLPLPGRAPSSSDRPLLSPTQGQEGPQDKAKKRHRNRSFLKHLESLRRKEKSGSQQAEPKHSPATSEKVSKASSFRSCRGFLSAGFYRAKNWAATSAGGSGANTRKAWEAWPVASFRHPQWTHRGDCLVHVPGDHKPGTFPRSLSIESLCPEDGHRLADWQPGRRWGCEGRRGSCGSTGSHASTYDNLPELYPAEPVMVGAEAEDEDDEESGGSYAHLDDILQHVWGLQQRVELWSRAMYPDLGPGDEEEEEATSSVEIATVEVKCQAEALSQMEVPAHGESPAWAQAEVQPAVLAPAQAPAEAEPVAQEEAEAPAPAPAPAPAQDSEQEAHSGGEPTFASSLSVEEGHSISDTVASSSELDSSGNSMNEAEAAGPLAGLQASMPRERRDSGVGASLTRPCRKLRWHSFQNSHRPSLNSESLEINRQFAGQINLLHKGSLLRLTAFMEKYTVPHKQGWVWSMPKFMRRNKTPDYRGQHVFGVPPLIHVQRTGQPLPQSIQQAMRYLRSQCLDQVGIFRKSGVKSRIQNLRQMNETSPDNVCYEGQSAYDVADLLKQYFRDLPEPIFTSKLTTTFLQIYQLLPKDQWLAAAQAATLLLPDENREVLQTLLYFLSDIASAEENQMTAGNLAVCLAPSIFHLNVSKKDSPSPRIKSKRSLIGRPGPRDLSDNMAATQGLSHMISDCKKLFQVPQDMVLQLCSSYSAAELSPPGPALAELRQAQAAGVSLSLYMEENIQDLLRDAAERFKGWMSVPGPQHTELACRKAPDGHPLRLWKASTEVAAPPAVVLHRVLRERALWDEDLLRAQVLEALMPGVELYHYVTDSMAPHPCRDFVVLRMWRSDLPRGGCLLVSQSLDPEQPVPESGVRALMLTSQYLMEPCGLGRSRLTHICRADLRGRSPDWYNKVFGHLCAMEVAKIRDSFPTLQAAGPETKL

SEQ ID NO: 36656 - protein, 1023 aa, Homo sapiens; identical to SEQ ID NO: 36655
  REGION 1..1023: note = ENSP00000252336

SEQ ID NO: 36657 - protein, 851 aa, Homo sapiens
  REGION 1..851: note = ENSP00000315768
MAQWEMLQNLDSPFQDQLHQLYSHSLLPVDIRQYLAVWIEDQNWQEAALGSDDSKATMLFFHFLDQLNYECGRCSQDPESLLLQHNLRKFCRDIQPFSQDPTQLAEMIFNLLLEEKRILIQAQRAQLEQGEPVLETPVESQQHEIESRILDLRAMMEKLVKSISQLKDQQDVFCFRYKIQAKGKTPSLDPHQTKEQKILQETLNELDKRRKEVLDASKALLGRLTTLIELLLPKLEEWKAQQQKACIRAPIDHGLEQLETWFTAGAKLLFHLRQLLKELKGLSCLVSYQDDPLTKGVDLRNAQVTELLQRLLHRAFVVETQPCMPQTPHRPLILKTGSKFTVRTRLLVRLQEGNESLTVEVSIDRNPPQLQGFRKFNILTSNQKTLTPEKGQSQGLIWDFGYLTLVEQRSGGSGKGSNKGPLGVTEELHIISFTVKYTYQGLKQELKTDTLPVVIISNMNQLSIAWASVLWFNLLSPNLQNQQFFSNPPKAPWSLLGPALSWQFSSYVGRGLNSDQLSMLRNKLFGQNCRTEDPLLSWADFTKRESPPGKLPFWTWLDKILELVHDHLKDLWNDGRIMGFVSRSQERRLLKKTMSGTFLLRFSESSEGGITCSWVEHQDDDKVLIYSVQPYTKEVLQSLPLTEIIRHYQLLTEENIPENPLRFLYPRIPRDEAFGCYYQEKVNLQERRKYLKHRLIVVSNRQVDELQQPLELKPEPELESLELELGLVPEPELSLDLEPLLKAGLDLGPELESVLESTLEPVIEPTLCMVSQTVPEPDQGPVSQPVPEPDLPCDLRHLNTEPMEIFRNCVKIEEIMPNGDPLLAGQNTVDEVYVSRPSHFYTDGPLMPSDF

SEQ ID NO: 36658 - protein, 847 aa, Homo sapiens
  REGION 1..847: note = ENSP00000450751
MAQWEMLQNLDSPFQDQLHQLYSHSLLPVDIRQYLAVWIEDQNWQEAALGSDDSKATMLFFHFLDQLNYECGRCSQDPESLLLQHNLRKFCRDIQDPTQLAEMIFNLLLEEKRILIQAQRAQLEQGEPVLETPVESQQHEIESRILDLRAMMEKLVKSISQLKDQQDVFCFRYKIQAKGKTPSLDPHQTKEQKILQETLNELDKRRKEVLDASKALLGRLTTLIELLLPKLEEWKAQQQKACIRAPIDHGLEQLETWFTAGAKLLFHLRQLLKELKGLSCLVSYQDDPLTKGVDLRNAQVTELLQRLLHRAFVVETQPCMPQTPHRPLILKTGSKFTVRTRLLVRLQEGNESLTVEVSIDRNPPQLQGFRKFNILTSNQKTLTPEKGQSQGLIWDFGYLTLVEQRSGGSGKGSNKGPLGVTEELHIISFTVKYTYQGLKQELKTDTLPVVIISNMNQLSIAWASVLWFNLLSPNLQNQQFFSNPPKAPWSLLGPALSWQFSSYVGRGLNSDQLSMLRNKLFGQNCRTEDPLLSWADFTKRESPPGKLPFWTWLDKILELVHDHLKDLWNDGRIMGFVSRSQERRLLKKTMSGTFLLRFSESSEGGITCSWVEHQDDDKVLIYSVQPYTKEVLQSLPLTEIIRHYQLLTEENIPENPLRFLYPRIPRDEAFGCYYQEKVNLQERRKYLKHRLIVVSNRQVDELQQPLELKPEPELESLELELGLVPEPELSLDLEPLLKAGLDLGPELESVLESTLEPVIEPTLCMVSQTVPEPDQGPVSQPVPEPDLPCDLRHLNTEPMEIFRNCVKIEEIMPNGDPLLAGQNTVDEVYVSRPSHFYTDGPLMPSDF

SEQ ID NO: 36659 - protein, 460 aa, Homo sapiens
  REGION 1..460: note = ENSP00000387354
MAQWEMLQNLDSPFQDQLHQLYSHSLLPVDIRQYLAVWIEDQNWQEAALGSDDSKATMLFFHFLDQLNYECGRCSQDPESLLLQHNLRKFCRDIQDPTQLAEMIFNLLLEEKRILIQAQRAQLEQGEPVLETPVESQQHEIESRILDLRAMMEKLVKSISQLKDQQDVFCFRYKIQAKGKTPSLDPHQTKEQKILQETLNELDKRRKEVLDASKALLGRLTTLIELLLPKLEEWKAQQQKACIRAPIDHGLEQLETWFTAGAKLLFHLRQLLKELKGLSCLVSYQDDPLTKGVDLRNAQVTELLQRLLHRAFVVETQPCMPQTPHRPLILKTGSKFTVRTRLLVRLQEGNESLTVEVSIDRNPPQLQGFRKFNILTSNQKTLTPEKGQSQGLIWDFGYLTLVEQRSGGSGKGSNKGPLGVTEELHIISFTVKYTYQGLKQELKVSENGGQGERKQLWKKA

SEQ ID NO: 36660 - protein, 65 aa, Homo sapiens
  REGION 1..65: note = ENSP00000450985
MAQWEMLQNLDSPFQDQLHQLYSHSLLPVDIRQYLAVWIEDQNWKLHLGVMIPRLPCYSSTSWIS

SEQ ID NO: 36661 - protein, 794 aa, Homo sapiens
  REGION 1..794: note = ENSP00000341208
MAGWIQAQQLQGDALRQMQVLYGQHFPIEVRHYLAQWIESQPWDAIDLDNPQDRAQATQLLEGLVQELQKKAEHQVGEDGFLLKIKLGHYATQLQKTYDRCPLELVRCIRHILYNEQRLVREANNCSSPAGILVDAMSQKHLQINQTFEELRLVTQDTENELKKLQQTQEYFIIQYQESLRIQAQFAQLAQLSPQERLSRETALQQKQVSLEAWLQREAQTLQQYRVELAEKHQKTLQLLRKQQTIILDDELIQWKRRQQLAGNGGPPEGSLDVLQSWCEKLAEIIWQNRQQIRRAEHLCQQLPIPGPVEEMLAEVNATITDIISALVTSTFIIEKQPPQVLKTQTKFAATVRLLVGGKLNVHMNPPQVKATIISEQQAKSLLKNENTRNECSGEILNNCCVMEYHQATGTLSAHFRNMSLKRIKRADRRGAESVTEEKFTVLFESQFSVGSNELVFQVKTLSLPVVVIVHGSQDHNATATVLWDNAFAEPGRVPFAVPDKVLWPQLCEALNMKFKAEVQSNRGLTKENLVFLAQKLFNNSSSHLEDYSGLSVSWSQFNRENLPGWNYTFWQWFDGVMEVLKKHHKPHWNDGAILGFVNKQQAHDLLINKPDGTFLLRFSDSEIGGITIAWKFDSPERNLWNLKPFTTRDFSIRSLADRLGDLSYLIYVFPDRPKDEVFSKYYTPVLAKAVDGYVKPQIKQVVPEFVNASADAGGSSATYMDQAPSPAVCPQAPYNMYPQNPDHVLDQDGEFDLDETMDVARHVEELLRRPMDSLDSRLSPPAGLFTSARGSLS

SEQ ID NO: 36662 - protein, 794 aa, Homo sapiens; identical to SEQ ID NO: 36661
  REGION 1..794: note = ENSP00000468749

SEQ ID NO: 36663 - protein, 764 aa, Homo sapiens
  REGION 1..764: note = ENSP00000443107
MAGWIQAQQLQGDALRQMQVLYGQHFPIEVRHYLAQWIESQPWDAIDLDNPQDRAQATQLLEGLVQELQKKAEHQVGEDGFLLKIKLGHYATQLQCSSPAGILVDAMSQKHLQINQTFEELRLVTQDTENELKKLQQTQEYFIIQYQESLRIQAQFAQLAQLSPQERLSRETALQQKQVSLEAWLQREAQTLQQYRVELAEKHQKTLQLLRKQQTIILDDELIQWKRRQQLAGNGGPPEGSLDVLQSWCEKLAEIIWQNRQQIRRAEHLCQQLPIPGPVEEMLAEVNATITDIISALVTSTFIIEKQPPQVLKTQTKFAATVRLLVGGKLNVHMNPPQVKATIISEQQAKSLLKNENTRNECSGEILNNCCVMEYHQATGTLSAHFRNMSLKRIKRADRRGAESVTEEKFTVLFESQFSVGSNELVFQVKTLSLPVVVIVHGSQDHNATATVLWDNAFAEPGRVPFAVPDKVLWPQLCEALNMKFKAEVQSNRGLTKENLVFLAQKLFNNSSSHLEDYSGLSVSWSQFNRENLPGWNYTFWQWFDGVMEVLKKHHKPHWNDGAILGFVNKQQAHDLLINKPDGTFLLRFSDSEIGGITIAWKFDSPERNLWNLKPFTTRDFSIRSLADRLGDLSYLIYVFPDRPKDEVFSKYYTPVLAKAVDGYVKPQIKQVVPEFVNASADAGGSSATYMDQAPSPAVCPQAPYNMYPQNPDHVLDQDGEFDLDETMDVARHVEELLRRPMDSLDSRLSPPAGLFTSARGSLS

SEQ ID NO: 36664 - protein, 141 aa, Homo sapiens
  REGION 1..141: note = ENSP00000464730
MSQKHLQINQTFEELRLVTQDTENELKKLQQTQEYFIIQYQESLRIQAQFAQLAQLSPQERLSRETALQQKQVSLEAWLQREAQTLQQYRVELAEKHQKTLQLLRKQQTIILDDELIQWKRRQQLAGNGGPPEGSLDVLQS

SEQ ID NO: 36665 - protein, 125 aa, Homo sapiens
  REGION 1..125: note = ENSP00000407327
MAGWIQAQQLQGDALRQMQVLYGQHFPIEVRHYLAQWIESQPWDAIDLDNPQDRAQATQLLEGLVQELQKKAEHQVGEDGFLLKIKLGHYATQLQKTYDRCPLELVRCIRHILYNEQRLVREANN

SEQ ID NO: 36666 - protein, 763 aa, Homo sapiens
  REGION 1..763: note = ENSP00000465437
MAGWIQAQQLQGDALRQMQVLYGQHFPIEVRHYLAQWIESQPWDAIDLDNPQDRAQATQLLEGLVQELQKKAEHQVGEDGFLLKIKLGHYATQLQKTYDRCPLELVRCIRHILYNEQRLVREANNCSSPAGILVDAMSQKHLQINQTFEELRLVTQDTENELKKLQQTQEYFIIQYQESLRIQAQFAQLAQLSPQERLSRETALQQKQVSLEAWLQREAQTLQQYRVELAEKHQKTLQLLRKQQTIILDDELIQWKRRQQLAGNGGPPEGSLDVLQSWCEKLAEIIWQNRQQIRRAEHLCQQLPIPGPVEEMLAEVNATITDIISALVTSTFIIEKQPPQVLKTQTKFAATVRLLVGGKLNVHMNPPQVKATIISEQQAKSLLKNENTRNECSGEILNNCCVMEYHQATGTLSAHFRNMSLKRIKRADRRGAESVTEEKFTVLFESQFSVGSNELVFQVKGRVPFAVPDKVLWPQLCEALNMKFKAEVQSNRGLTKENLVFLAQKLFNNSSSHLEDYSGLSVSWSQFNRENLPGWNYTFWQWFDGVMEVLKKHHKPHWNDGAILGFVNKQQAHDLLINKPDGTFLLRFSDSEIGGITIAWKFDSPERNLWNLKPFTTRDFSIRSLADRLGDLSYLIYVFPDRPKDEVFSKYYTPVLAKAVDGYVKPQIKQVVPEFVNASADAGGSSATYMDQAPSPAVCPQAPYNMYPQNPDHVLDQDGEFDLDETMDVARHVEELLRRPMDSLDSRLSPPAGLFTSARGSLS

SEQ ID NO: 36667 - protein, 229 aa, Homo sapiens
  REGION 1..229: note = ENSP00000466320
MKFKAEVQSNRGLTKENLVFLAQKLFNNSSSHLEDYSGLSVSWSQFNRENLPGWNYTFWQWFDGVMEVLKKHHKPHWNDGAILGFVNKQQAHDLLINKPDGTFLLRFSDSEIGGITIAWKFDSPERNLWNLKPFTTRDFSIRSLADRLGDLSYLIYVFPDRPKDEVFSKYYTPVLAKAVDGYVKPQIKQVVPEFVNASADAGGSSATYMDQAPSPAVCPQAPYNMYPQK

SEQ ID NO: 36668 - protein, 302 aa, Homo sapiens
  REGION 1..302: note = ENSP00000265087
MCAERLGQFMTLALVLATFDPARGTDATNPPEGPQDRSSQQKGRLSLQNTAEIQHCLVNAGDVGCGVFECFENNSCEIRGLHGICMTFLHNAGKFDAQGKSFIKDALKCKAHALRHRFGCISRKCPAIREMVSQLQRECYLKHDLCAAAQENTRVIVEMIHFKDLLLHEPYVDLVNLLLTCGEEVKEAITHSVQVQCEQNWGSLCSILSFCTSAIQKPPTAPPERQPQVDRTKLSRAHHGEAGHHLPEPSSRETGRGAKGERGSKSHPNAHARGRVGGLGAQGPSGSSEWEDEQSEYSDIRR

SEQ ID NO: 36669 - protein, 123 aa, Homo sapiens
  REGION 1..123: note = ENSP00000428470
  VARIANT 1: note = Any amino acid
XQNTAEIQHCLVNAGDVGCGVFECFENNSCEIRGLHGICMTFLHNAGKFDAQGKSFIKDALKCKAHALRHRFGCISRKCPAIREMVSQLQRECYLKHDLCAAAQENTRVIVEMIHFKDLLLHE

SEQ ID NO: 36670 - protein, 53 aa, Homo sapiens
  REGION 1..53: note = ENSP00000427816
MTFLHNAGKFDAQGKSFIKDALKCKAHALRHRFGCISRKCPAIREMVSQLQRE

SEQ ID NO: 36671 - protein, 498 aa, Homo sapiens
  REGION 1..498: note = ENSP00000376822
MSHQPAVATKMPEEMDKPLISLHLVDSDSSLAKVPDEAPKVGILGSGDFARSLATRLVGSGFKVVVGSRNPKRTARLFPSAAQVTFQEEAVSSPEVIFVAVFREHYSSLCSLSDQLAGKILVDVSNPTEQEHLQHRESNAEYLASLFPTCTVVKAFNVISAWTLQAGPRDGNRQVPICGDQPEAKRAVSEMALAMGFMPVDMGSLASAWEVEAMPLRLLPAWKVPTLLALGLFVCFYAYNFVRDVLQPYVQESQNKFFKLPVSVVNTTLPCVAYVLLSLVYLPGVLAAALQLRRGTKYQRFPDWLDHWLQHRKQIGLLSFFCAALHALYSFCLPLRRAHRYDLVNLAVKQVLANKSHLWVEEEVWRMEIYLSLGVLALGTLSLLAVTSLPSIANSLNWREFSFVQSSLGFVALVLSTLHTLTYGWTRAFEESRYKFYLPPTFTLTLLVPCVVILAKALFLLPCISRRLARIRRGWERESTIKFTLPTDHALAEKTSHV

SEQ ID NO: 36672 - protein, 488 aa, Homo sapiens
  REGION 1..488: note = ENSP00000376818
MPEEMDKPLISLHLVDSDSSLAKVPDEAPKVGILGSGDFARSLATRLVGSGFKVVVGSRNPKRTARLFPSAAQVTFQEEAVSSPEVIFVAVFREHYSSLCSLSDQLAGKILVDVSNPTEQEHLQHRESNAEYLASLFPTCTVVKAFNVISAWTLQAGPRDGNRQVPICGDQPEAKRAVSEMALAMGFMPVDMGSLASAWEVEAMPLRLLPAWKVPTLLALGLFVCFYAYNFVRDVLQPYVQESQNKFFKLPVSVVNTTLPCVAYVLLSLVYLPGVLAAALQLRRGTKYQRFPDWLDHWLQHRKQIGLLSFFCAALHALYSFCLPLRRAHRYDLVNLAVKQVLANKSHLWVEEEVWRMEIYLSLGVLALGTLSLLAVTSLPSIANSLNWREFSFVQSSLGFVALVLSTLHTLTYGWTRAFEESRYKFYLPPTFTLTLLVPCVVILAKALFLLPCISRRLARIRRGWERESTIKFTLPTDHALAEKTSHV

SEQ ID NO: 36673 - protein, 457 aa, Homo sapiens
  REGION 1..457: note = ENSP00000386510
MPEEMDKPLISLHLVDSDSSLAKVPDEAPKVGILGSGDFARSLATRLVGSGFKVVVGSRNPKRTARLFPSAAQVTFQEEAVSSPEVIFVAVFREHYSSLCSLSDQLAGKILVDVSNPTEQEHLQHRESNAEYLASLFPTCTVVKAFNVISAWTLQAGPRDGNRQVPICGDQPEAKRAVSEMALAMGFMPVDMGSLASAWEVEAMPLRLLPAWKVPTLLALGLFVCFYAYNFVRDVLQPYVQESQNKFFKLPVSVVNTTLPCVAYVLLSLVYLPGVLAAALQLRRGTKYQRFPDWLDHWLQHRKQIGLLSFFCAALHALYSFCLPLRRAHRYDLVNLAVKQVLANKSHLWVEEEVWRMEIYLSLGVLALGTLSLLAVTSLPSIANSLNWREFSFVQCVATSSAGNTGSGTRRPESQSQDPHLPAPHHQTSFLGPRSFCCSLVPVSTPYGHQEDLSWTR

SEQ ID NO: 36674 - protein, 488 aa, Homo sapiens; identical to SEQ ID NO: 36672
  REGION 1..488: note = ENSP00000376819

SEQ ID NO: 36675 - protein, 590 aa, Homo sapiens
  REGION 1..590: note = ENSP00000351646
MESGSPMGEVEISRTIRTNGRGQRGYDWQCKRPIRVAEVRSSLHSWSLRWVNELKEKGNKALSVGNIDDALQCYSEAIKLDPHNHVLYSNRSAAYAKKGDYQKAYEDGCKTVDLKPDWGKGYSRKAAALEFLNRFEEAKRTYEEGLKHEANNPQLKEGLQNMEARLAERKFMNPFNMPNLYQKLESDPRTRTLLSDPTYRELIEQLRNKPSDLGTKLQDPRIMTTLSVLLGVDLGSMDEEEEIATPPPPPPPKKETKPEPMEEDLPENKKQALKEKELGNDAYKKKDFDTALKHYDKAKELDPTNMTYITNQAAVYFEKGDYNKCRELCEKAIEVGRENREDYRQIAKAYARIGNSYFKEEKYKDAIHFYNKSLAEHRTPDVLKKCQQAEKILKEQERLAYINPDLALEEKNKGNECFQKGDYPQAMKHYTEAIKRNPKDAKLYSNRAACYTKLLEFQLALKDCEECIQLEPTFIKGYTRKAAALEAMKDYTKAMDVYQKALDLDSSCKEAADGYQRCMMAQYNRHDSPEDVKRRAMADPEVQQIMSDPAMRLILEQMQKDPQALSEHLKNPVIAQKIQKLMDVGLIAIR

SEQ ID NO: 36676 - protein, 543 aa, Homo sapiens
  REGION 1..543: note = ENSP00000305958
MEQVNELKEKGNKALSVGNIDDALQCYSEAIKLDPHNHVLYSNRSAAYAKKGDYQKAYEDGCKTVDLKPDWGKGYSRKAAALEFLNRFEEAKRTYEEGLKHEANNPQLKEGLQNMEARLAERKFMNPFNMPNLYQKLESDPRTRTLLSDPTYRELIEQLRNKPSDLGTKLQDPRIMTTLSVLLGVDLGSMDEEEEIATPPPPPPPKKETKPEPMEEDLPENKKQALKEKELGNDAYKKKDFDTALKHYDKAKELDPTNMTYITNQAAVYFEKGDYNKCRELCEKAIEVGRENREDYRQIAKAYARIGNSYFKEEKYKDAIHFYNKSLAEHRTPDVLKKCQQAEKILKEQERLAYINPDLALEEKNKGNECFQKGDYPQAMKHYTEAIKRNPKDAKLYSNRAACYTKLLEFQLALKDCEECIQLEPTFIKGYTRKAAALEAMKDYTKAMDVYQKALDLDSSCKEAADGYQRCMMAQYNRHDSPEDVKRRAMADPEVQQIMSDPAMRLILEQMQKDPQALSEHLKNPVIAQKIQKLMDVGLIAIR

SEQ ID NO: 36677 - protein, 138 aa, Homo sapiens
  REGION 1..138: note = ENSP00000441036
MEQVNELKEKGNKALSVGNIDDALQCYSEAIKLDPHNHVLYSNRSAAYAKKGDYQKAYEDGCKTVDLKPDWGKGYSRKAAALEFLNRFEEAKRTYEEGLKHEANNPQLKEGLQNMEARLAVQPARQPRRCEATSHGRP

SEQ ID NO: 36678 - protein, 519 aa, Homo sapiens
  REGION 1..519: note = ENSP00000445957
MEQVNELKEKGNKALSVGNIDDALQCYSEAIKLDPHNHVLYSNRSAAYAKKGDYQKAYEDGCKTVDLKPDWGKGLKHEANNPQLKEGLQNMEARLAERKFMNPFNMPNLYQKLESDPRTRTLLSDPTYRELIEQLRNKPSDLGTKLQDPRIMTTLSVLLGVDLGSMDEEEEIATPPPPPPPKKETKPEPMEEDLPENKKQALKEKELGNDAYKKKDFDTALKHYDKAKELDPTNMTYITNQAAVYFEKGDYNKCRELCEKAIEVGRENREDYRQIAKAYARIGNSYFKEEKYKDAIHFYNKSLAEHRTPDVLKKCQQAEKILKEQERLAYINPDLALEEKNKGNECFQKGDYPQAMKHYTEAIKRNPKDAKLYSNRAACYTKLLEFQLALKDCEECIQLEPTFIKGYTRKAAALEAMKDYTKAMDVYQKALDLDSSCKEAADGYQRCMMAQYNRHDSPEDVKRRAMADPEVQQIMSDPAMRLILEQMQKDPQALSEHLKNPVIAQKIQKLMDVGLIAIR

SEQ ID NO: 36679 - protein, 236 aa, Homo sapiens
  REGION 1..236: note = ENSP00000442704
MEQVNELKEKGNKALSVGNIDDALQCYSEAIKLDPHNHVLYSNRSAAYAKKGDYQKAYEDGCKTVDLKPDWGKGYSRKAAALEFLNRFEEAKRTYEEGLKHEANNPQLKEGLQNMEARLAERKFMNPFNMPNLYQKLESDPRTRTLLSDPTYRELIEQLRNKPSDLGTKLQDPRIMTTLSVLLGVDLGSMDEEEEIATPPPPPPPKKETKPEPMEEDLPENKKQVLFFSLLTVTYL

SEQ ID NO: 36680 - protein, 137 aa, Homo sapiens
  REGION 1..137: note = ENSP00000443416
ACYTKLLEFQLALKDCEECIQLEPTFIKGYTRKAAALEAMKDYTKAMDVYQKALDLDSSCKEAADGYQRCMMAQYNRHDSPEDVKRRAMADPEVQQIMSDPAMRLILEQMQKDPQALSEYVESERRPCWKWRTKAGR

SEQ ID NO: 36681 - protein, 372 aa, Homo sapiens
  REGION 1..372: note = ENSP00000263955
MSRRRFDCRSISGLLTTTPQIPIKMENFNNFYILTSKELGRGKFAVVRQCISKSTGQEYAAKFLKKRRRGQDCRAEILHEIAVLELAKSCPRVINLHEVYENTSEIILILEYAAGGEIFSLCLPELAEMVSENDVIRLIKQILEGVYYLHQNNIVHLDLKPQNILLSSIYPLGDIKIVDFGMSRKIGHACELREIMGTPEYLAPEILNYDPITTATDMWNIGIIAYMLLTHTSPFVGEDNQETYLNISQVNVDYSEETFSSVSQLATDFIQSLLVKNPEKRPTAEICLSHSWLQQWDFENLFHPEETSSSSQTQDHSVRSSEDKTSKSSCNGTCGDREDKENIPEDSSMVSKRFRFDDSLPNPHELVSDLLC

SEQ ID NO: 36682 - protein, 372 aa, Homo sapiens; identical to SEQ ID NO: 36681
  REGION 1..372: note = ENSP00000386853

SEQ ID NO: 36683 - protein, 69 aa, Homo sapiens
  REGION 1..69: note = ENSP00000475843
KFAVVRQCISKSTGQEYAAKFLKKRRRGQDCRAEILHEIAVLELAKSCPRVINLHEVYENTSEIILILE

SEQ ID NO: 36684 - protein, 67 aa, Homo sapiens
  REGION 1..67: note = ENSP00000399755
MSRRRFDCRSISGLLTTTPQIPIKMENFNNFYILTSKELGRGKFAVVRQCISKSTGQEYAAKFLKKR

SEQ ID NO: 36685 - protein, 6 aa, Homo sapiens
  REGION 1..6: note = ENSP00000413289
MSRRRF

SEQ ID NO: 36686 - protein, 364 aa, Homo sapiens
  REGION 1..364: note = ENSP00000389352
MQKWFSAFDDAIIQRQWRANPSRGGGGVSFTKEVDTNVATGAPPRRQRVPGRACPWREPIRGRRGARPGGGDAGGTPGETVRHCSAPEDPIFRFSSLHSYPFPGTIKSRDMSWKRHHLIPETFGVKRRRKRGPVESDPLRGEPGSARAAVSELMQLFPRGLFEDALPPIVLRSQVYSLVPDRTVADRQLKELQEQGEIRIVQLGFDLDAHGIIFTEDYRTRVLKACDGRPYAGAVQKFLASVLPACGDLSFQQDQMTQTFGFRDSEITHLVNAGVLTVRDAGSWWLAVPGAGRFIKYFVKGRQAVLSMVRKAKYRELLLSELLGRRAPVVVRLGLTYHVHDLIGAQLVDCISTTSGTLLRLPET

SEQ ID NO: 36687 - protein, 368 aa, Homo sapiens
  REGION 1..368: note = ENSP00000413766
MQKWFSAFDDAIIQRQWRANPSRGGGGVSFTKEVDTNVATGAPPRRQRVPGRACPWREPIRGRRGARPGGGDAGGTPGETVRHCSAPEDPIFRFSSLHSYPFPGTIKSRDMSWKRHHLIPETFGVKRRRKRGPVESDPLRGEPGSARAAVSELMQLFPRGLFEDALPPIVLRSQVYSLVPDRTVADRQLKELQEQGEIRIVQLGFDLDAHGIIFTEDYRTRVCDCVLKACDGRPYAGAVQKFLASVLPACGDLSFQQDQMTQTFGFRDSEITHLVNAGVLTVRDAGSWWLAVPGAGRFIKYFVKGRQAVLSMVRKAKYRELLLSELLGRRAPVVVRLGLTYHVHDLIGAQLVDCISTTSGTLLRLPET

SEQ ID NO: 36688 - protein, 70 aa, Homo sapiens
  REGION 1..70: note = ENSP00000428007
  VARIANT 1: note = Any amino acid
XPFPGTIKSRDMSWKRHHLIPETFGVKRRRKRGPVESDPLRGEPEGASRAGGDQNRPAGLRLGCPWNYLH

SEQ ID NO: 36689 - protein, 321 aa, Homo sapiens
  REGION 1..321: note = ENSP00000446620
MLVCASPPPLPALTGLRDDKLTLLSSSPGLGGTPGETVRHCSAPEDPIFRFSSLHSYPFPGTIKSRDMSWKRHHLIPETFGVKRRRKRGPVESDPLRGEPGSARAAVSELMQLFPRGLFEDALPPIVLRSQVYSLVPDRTVADRQLKELQEQGEIRIVQLGFDLDAHGIIFTEDYRTRVLKACDGRPYAGAVQKFLASVLPACGDLSFQQDQMTQTFGFRDSEITHLVNAGVLTVRDAGSWWLAVPGAGRFIKYFVKGRQAVLSMVRKAKYRELLLSELLGRRAPVVVRLGLTYHVHDLIGAQLVDCISTTSGTLLRLPET

SEQ ID NO: 36690 - protein, 364 aa, Homo sapiens; identical to SEQ ID NO: 36686
  REGION 1..364: note = ENSP00000395028

SEQ ID NO: 36691 - protein, 368 aa, Homo sapiens; identical to SEQ ID NO: 36687
  REGION 1..368: note = ENSP00000395864

SEQ ID NO: 36692 - protein, 321 aa, Homo sapiens; identical to SEQ ID NO: 36689
  REGION 1..321: note = ENSP00000449149

SEQ ID NO: 36693 - protein, 112 aa, Homo sapiens
  REGION 1..112: note = ENSP00000418350
MQKWFSAFDDAIIQRQWRANPSRGGGGVSFTKEVDTNVATGAPPRRQRVPGRACPWREPIRGRRGARPGGGDAGGTPGETVRHCSAPEDPIFRFSSLHSYPFPGTIKSRDMS

SEQ ID NO: 36694 - protein, 364 aa, Homo sapiens; identical to SEQ ID NO: 36686
  REGION 1..364: note = ENSP00000364480

SEQ ID NO: 36695 - protein, 368 aa, Homo sapiens; identical to SEQ ID NO: 36687
  REGION 1..368: note = ENSP00000364482

SEQ ID NO: 36696 - protein, 70 aa, Homo sapiens; identical to SEQ ID NO: 36688
  REGION 1..70: note = ENSP00000418866
  VARIANT 1: note = Any amino acid

SEQ ID NO: 36697 - protein, 70 aa, Homo sapiens; identical to SEQ ID NO: 36688
  REGION 1..70: note = ENSP00000454870
  VARIANT 1: note = Any amino acid

SEQ ID NO: 36698 - protein, 364 aa, Homo sapiens; identical to SEQ ID NO: 36686
  REGION 1..364: note = ENSP00000393272

SEQ ID NO: 36699 - protein, 368 aa, Homo sapiens; identical to SEQ ID NO: 36687
  REGION 1..368: note = ENSP00000391798

SEQ ID NO: 36700 - protein, 321 aa, Homo sapiens; identical to SEQ ID NO: 36689
  REGION 1..321: note = ENSP00000447097

SEQ ID NO: 36701 - protein, 364 aa, Homo sapiens
  REGION 1..364: note = ENSP00000372818
MQKWFSAFDDAIIQRQWRANPSRGGGGVSFTKEVDTNVATGAPPRRQRVPGRACPWREPIRGRRGARPGGGDAGGTPGETVRHCSAPEDPIFRFSSLHSYPFPGTIKSRDMSWKRHHLIPETFGVKRRRKRGPVESDPLRGEPGSARAAVSELMQLFPRGLFEDALPPIVLRSQVYSLVPDRTVADRQLKELQEQGEIRIVQLGFDLDAHGIIFTEDYRTRVLKACDGRPYAGAVQKFLASVLPACGDLSFQQDQMTQTFGFRDSEITHLVNAGVLTVRDAGSWWLAVPGAGRFIKYFVKGRQAVLGMVRKAKYRELLLSELLGRRAPVVVRLGLTYHVHDLIGAQLVDCISTTSGTLLRLPET

SEQ ID NO: 36702 - protein, 368 aa, Homo sapiens [sequence omitted]

SEQ ID NO: 36703 - protein, 67 aa, Homo sapiens
  REGION 1..67: note = ENSP00000476036
PGTIKSRDMSWKRHHLIPETFGVKRRRKRGPVESDPLRGEPEGASRAGGDQNRPAGLRLGCPWNYLH

SEQ ID NO: 36704 - protein, 321 aa, Homo sapiens
  REGION 1..321: note = ENSP00000448123
MLVCASPPPLPALTGLRDDKLTLLSSSPGLGGTPGETVRHCSAPEDPIFRFSSLHSYPFPGTIKSRDMSWKRHHLIPETFGVKRRRKRGPVESDPLRGEPGSARAAVSELMQLFPRGLFEDALPPIVLRSQVYSLVPDRTVADRQLKELQEQGEIRIVQLGFDLDAHGIIFTEDYRTRVLKACDGRPYAGAVQKFLASVLPACGDLSFQQDQMTQTFGFRDSEITHLVNAGVLTVRDAGSWWLAVPGAGRFIKYFVKGRQAVLGMVRKAKYRELLLSELLGRRAPVVVRLGLTYHVHDLIGAQLVDCISTTSGTLLRLPET

SEQ ID NO: 36705 - protein, 364 aa, Homo sapiens; identical to SEQ ID NO: 36686
  REGION 1..364: note = ENSP00000399915

SEQ ID NO: 36706 - protein, 368 aa, Homo sapiens; identical to SEQ ID NO: 36687
  REGION 1..368: note = ENSP00000403479

SEQ ID NO: 36707 - protein, 70 aa, Homo sapiens; identical to SEQ ID NO: 36688
  REGION 1..70: note = ENSP00000429285
  VARIANT 1: note = Any amino acid

SEQ ID NO: 36708 - protein, 321 aa, Homo sapiens; identical to SEQ ID NO: 36689
  REGION 1..321: note = ENSP00000446725

SEQ ID NO: 36709 - protein, 491 aa, Homo sapiens
  REGION 1..491: note = ENSP00000390500
MEQPPAPKSKLKKLSEDSLTKQPEEVFDVLEKLGEGSYGSVFKAIHKESGQVVAIKQVPVESDLQEIIKEISIMQQCDSPYVVKYYGSYFKNTDLWIVMEYCGAGSVSDIIRLRNKTLIEDEIATILKSTLKGLEYLHFMRKIHRDIKAGNILLNTEGHAKLADFGVAGQLTDTMAKRNTVIGTPFWMAPEVIQEIGYNCVADIWSLGITSIEMAEGKPPYADIHPMRAIFMIPTNPPPTFRKPELWSDDFTDFVKKCLVKNPEQRATATQLLQHPFIKNAKPVSILRDLITEAMEIKAKRHEEQQRELEEEEENSDEDELDSHTMVKTSVESVGTMRATSTMSEGAQTMIEHNSTMLESDLGTMVINSEDEEEEDGTMKRNATSPQVQRPSFMDYFDKQDFKNKSHENCNQNMHEPFPMSKNVFPDNWKVPQDGDFDFLKNLSLEELQMRLKALDPMMEREIEELRQRYTAKRQPILDAMDAKKRRQQNF

SEQ ID NO: 36710 - protein, 519 aa, Homo sapiens
  REGION 1..519: note = ENSP00000429744
MLQLMDSGITICLRNGAASVFKKKEWSTQGEENKQDSKLKKLSEDSLTKQPEEVFDVLEKLGEGSYGSVFKAIHKESGQVVAIKQVPVESDLQEIIKEISIMQQCDSPYVVKYYGSYFKNTDLWIVMEYCGAGSVSDIIRLRNKTLIEDEIATILKSTLKGLEYLHFMRKIHRDIKAGNILLNTEGHAKLADFGVAGQLTDTMAKRNTVIGTPFWMAPEVIQEIGYNCVADIWSLGITSIEMAEGKPPYADIHPMRAIFMIPTNPPPTFRKPELWSDDFTDFVKKCLVKNPEQRATATQLLQHPFIKNAKPVSILRDLITEAMEIKAKRHEEQQRELEEEEENSDEDELDSHTMVKTSVESVGTMRATSTMSEGAQTMIEHNSTMLESDLGTMVINSEDEEEEDGTMKRNATSPQVQRPSFMDYFDKQDFKNKSHENCNQNMHEPFPMSKNVFPDNWKVPQDGDFDFLKNLSLEELQMRLKALDPMMEREIEELRQRYTAKRQPILDAMDAKKRRQQNF

SEQ ID NO: 36711 - protein, 228 aa, Homo sapiens
  REGION 1..228: note = ENSP00000428014
MEQPPAPKSKLKKLSEDSLTKQPEEVFDVLEKLGEGSYGSVFKAIHKESGQVVAIKQVPVESDLQEIIKEISIMQQCDSPYVVKYYGSYFKNTDLWIVMEYCGAGSVSDIIRLRNKTAIFMIPTNPPPTFRKPELWSDDFTDFVKKCLVKNPEQRATATQLLQHPFIKNAKPVSILRDLITEAMEIKAKRHEEQQRELEEEEENSDEDELDSHTMVKTSVESVGTMRA

SEQ ID NO: 36712 - protein, 82 aa, Homo sapiens
  REGION 1..82: note = ENSP00000429369
MEQPPAPKSKLKKLSEDSLTKQPEEVFDVLEKLGEGSYGSVFKAIHKESGQVVAIKQVPVESDLQEIIKEISIMQQCDRLFL

SEQ ID NO: 36713 - protein, 168 aa, Homo sapiens
  REGION 1..168: note = ENSP00000428167
MEQPPAPKSKLKKLSEDSLTKQPEEVFDVLEKLGEGSYGSVFKAIHKESGQVVAIKQVPVESDLQEIIKEISIMQQCDSPYVVKYYGSYFKNTDLWIVMEYCGAGSVSDIIRLRNKTGFLTDTTEGSASCDLRMDLTLFHLGAEFLHYLLLYEADPLSCVFSLLVFSV

SEQ ID NO: 36714 - skipped

SEQ ID NO: 36715 - protein, 380 aa, Homo sapiens
  REGION 1..380: note = ENSP00000482260
MEQPPAPKSKLKKLSEDSLTKQPEEVFDVLEKLGEGSYGSVFKAIHKESGQVVAIKQVPVESDLQEIIKEISIMQQCDSPYVVKYYGSYFKNTDLWIVMEYCGAGSVSDIIRLRNKTAIFMIPTNPPPTFRKPELWSDDFTDFVKKCLVKNPEQRATATQLLQHPFIKNAKPVSILRDLITEAMEIKAKRHEEQQRELEEEEENSDEDELDSHTMVKTSVESVGTMRATSTMSEGAQTMIEHNSTMLESDLGTMVINSEDEEEEDGTMKRNATSPQVQRPSFMDYFDKQDFKNKSHENCNQNMHEPFPMSKNVFPDNWKVPQDGDFDFLKNLSLEELQMRLKALDPMMEREIEELRQRYTAKRQPILDAMDAKKRRQQNF

SEQ ID NO: 36716 - protein, 396 aa, Homo sapiens
  REGION 1..396: note = ENSP00000381030
MGANTSRKPPVFDENEDVNFDHFEILRAIGKGSFGKVCIVQKNDTKKMYAMKYMNKQKCVERNEVRNVFKELQIMQGLEHPFLVNLWYSFQDEEDMFMVVDLLLGGDLRYHLQQNVHFKEETVKLFICELVMALDYLQNQRIIHRDMKPDNILLDEHGHVHITDFNIAAMLPRETQITTMAGTKPYMAPEMFSSRKGAGYSFAVDWWSLGVTAYELLRGRRPYHIRSSTSSKEIVHTFETTVVTYPSAWSQEMVSLLKKLLEPNPDQRFSQLSDVQNFPYMNDINWDAVFQKRLIPGFIPNKGRLNCDPTFELEEMILESKPLHKKKKRLAKKEKDMRKCDSSQTCLLQEHLDSVQKEFIIFNREKVNRDFNKRQPNLALEQTKDPQGEDGQNNNL

SEQ ID NO: 36717 - protein, 166 aa, Homo sapiens
  REGION 1..166: note = ENSP00000487441
MGANTSRKPPVFDENEDVNFDHFEILRAIGKGSFGKVCIVQKNDTKKMYAMKYMNKQKCVERNEVRNVFKELQIMQGLEHPFLVNLWYSFQDEEDMFMVVDLLLGGDLRYHLQQNVHFKEETVKLFICELVMALDYLQNQRIIHRDMKPDNILLDEHDTWLSYKSH

SEQ ID NO: 36718 - protein, 407 aa, Homo sapiens
  REGION 1..407: note = ENSP00000381535
MGANTSRKPPVFDENEDVNFDHFEILRAIGKGSFGKVCIVQKNDTKKMYAMKYMNKQKCVERNEVRNVFKELQIMQGLEHPFLVNLWYSFQDEEDMFMVVDLLLGGDLRYHLQQNVHFKEETVKLFICELVMALDYLQNQRIIHRDMKPDNILLDEHGHVHITDFNIAAMLPRETQITTMAGTKPYMAPEMFSSRKGAGYSFAVDWWSLGVTAYELLRGRRPYHIRSSTSSKEIVHTFETTVVTYPSAWSQEMVSLLKKLLEPNPDQRFSQLSDVQNFPYMNDINWDAVFQKRLIPGFIPNKGRLNCDPTFELEEMILESKPLHKKKKRLAKKEKDMRKCDSSQTCLLQEHLDSVQKEFIIFNREKVNRDFNKRQPNLALEQTKDPQVTNGQMDTGLSETFQTSKVS

SEQ ID NO: 36719 - protein, 414 aa, Homo sapiens
  REGION 1..414: note = ENSP00000282908
MGGNHSHKPPVFDENEEVNFDHFQILRAIGKGSFGKVCIVQKRDTKKMYAMKYMNKQKCIERDEVRNVFRELQIMQGLEHPFLVNLWYSFQDEEDMFMVVDLLLGGDLRYHLQQNVHFTEGTVKLYICELALALEYLQRYHIIHRDIKPDNILLDEHGHVHITDFNIATVVKGAERASSMAGTKPYMAPEVFQVYMDRGPGYSYPVDWWSLGITAYELLRGWRPYEIHSVTPIDEILNMFKVERVHYSSTWCKGMVALLRKLLTKDPESRVSSLHDIQSVPYLADMNWDAVFKKALMPGFVPNKGRLNCDPTFELEEMILESKPLHKKKKRLAKNRSRDGTKDSCPLNGHLQHCLETVREEFIIFNREKLRRQQGQGSQLLDTDSRGGGQAQSKLQDGCNNNLLTHTCTRGCSS

SEQ ID NO: 36720 - protein, 51 aa, Homo sapiens
  REGION 1..51: note = ENSP00000422820
MGGNHSHKPPVFDENEEVNFDHFQILRAIGKGSFGKDCQCRLFLENLSEES

SEQ ID NO: 36721 - protein, 337 aa, Homo sapiens
  REGION 1..337: note = ENSP00000423209
MYAMKYMNKQKCIERDEVRNVFRELQIMQGLEHPFLVNLWYSFQDEEDMFMVVDLLLGGDLRYHLQQNVHFTEGTVKLYICELALALEYLQRYHIIHRDIKPDNILLDEHAPEVFQVYMDRGPGYSYPVDWWSLGITAYELLRGWRPYEIHSVTPIDEILNMFKVERVHYSSTWCKGMVALLRKLLTKDPESRVSSLHDIQSVPYLADMNWDAVFKKALMPGFVPNKGRLNCDPTFELEEMILESKPLHKKKKRLAKNRSRDGTKDSCPLNGHLQHCLETVREEFIIFNREKLRRQQGQGSQLLDTDSRGGGQAQSKLQDGCNNNLLTHTCTRGCSS

SEQ ID NO: 36722 - protein, 367 aa, Homo sapiens
  REGION 1..367: note = ENSP00000420984
MYAMKYMNKQKCIERDEVRNVFRELQIMQGLEHPFLVNLWYSFQDEEDMFMVVDLLLGGDLRYHLQQNVHFTEGTVKLYICELALALEYLQRYHIIHRDIKPDNILLDEHGHVHITDFNIATVVKGAERASSMAGTKPYMAPEVFQVYMDRGPGYSYPVDWWSLGITAYELLRGWRPYEIHSVTPIDEILNMFKVERVHYSSTWCKGMVALLRKLLTKDPESRVSSLHDIQSVPYLADMNWDAVFKKALMPGFVPNKGRLNCDPTFELEEMILESKPLHKKKKRLAKNRSRDGTKDSCPLNGHLQHCLETVREEFIIFNREKLRRQQGQGSQLLDTDSRGGGQAQSKLQDGCNNNLLTHTCTRGCSS

SEQ ID NO: 36723 - protein, 514 aa, Homo sapiens
  REGION 1..514: note = ENSP00000416750
MADSGLDKKSTKCPDCSSASQKDVLCVCSSKTRVPPVLVVEMSQTSSIGSAESLISLERKKEKNINRDITSRKDLPSRTSNVERKASQQQWGRGNFTEGKVPHIRIENGAAIEEIYTFGRILGKGSFGIVIEATDKETETKWAIKKVNKEKAGSSAVKLLEREVNILKSVKHEHIIHLEQVFETPKKMYLVMELCEDGELKEILDRKGHFSENETRWIIQSLASAIAYLHNNDIVHRDLKLENIMVKSSLIDDNNEINLNIKVTDFGLAVKKQSRSEAMLQATCGTPIYMAPEVISAHDYSQQCDIWSIGVVMYMLLRGEPPFLASSEEKLFELIRKGELHFENAVWNSISDCAKSVLKQLMKVDPAHRITAKELLDNQWLTGNKLSSVRPTNVLEMMKEWKNNPESVEENTTEEKNKPSTEEKLKSYQPWGNVPDANYTSDEEEEKQSTAYEKQFPATSKDNFDMCSSSFTSSKLLPAEIKGEMEKTPVTPSQGTATKYPAKSGALSRTKKKL

SEQ ID NO: 36724 - protein, 514 aa, Homo sapiens; identical to SEQ ID NO: 36723
  REGION 1..514: note = ENSP00000320754

SEQ ID NO: 36725 - protein, 514 aa, Homo sapiens; identical to SEQ ID NO: 36723
  REGION 1..514: note = ENSP00000379905

SEQ ID NO: 36726 - protein, 327 aa, Homo sapiens
  REGION 1..327: note = ENSP00000351743
MYLVMELCEDGELKEILDRKGHFSENETRWIIQSLASAIAYLHNNDIVHRDLKLENIMVKSSLIDDNNEINLNIKVTDFGLAVKKQSRSEAMLQATCGTPIYMAPEVISAHDYSQQCDIWSIGVVMYMLLRGEPPFLASSEEKLFELIRKGELHFENAVWNSISDCAKSVLKQLMKVDPAHRITAKELLDNQWLTGNKLSSVRPTNVLEMMKEWKNNPESVEENTTEEKNKPSTEEKLKSYQPWGNVPDANYTSDEEEEKQSTAYEKQFPATSKDNFDMCSSSFTSSKLLPAEIKGEMEKTPVTPSQGTATKYPAKSGALSRTKKKL

SEQ ID NO: 36727 - protein, 203 aa, Homo sapiens
  REGION 1..203: note = ENSP00000415688
VKSSLIDDNNEINLNIKVTDFGLAVKKQSRSEAMLQATCGTPIYMAPEVISAHDYSQQCDIWSIGVVMYMLLRGEPPFLASSEEKLFELIRKGELHFENAVWNSISDCAKSVLKQLMKVDPAHRITAKELLDNQWLTSTAYEKQFPATSKDNFDMCSSSFTSSKLLPAEIKGEMEKTPVTPSQGTATKYPAKSGALSRTKKKL

SEQ ID NO: 36728 - protein, 473 aa, Homo sapiens
  REGION 1..473: note = ENSP00000436418
MSQTSSIGSAESLISLERKKEKNINRDITSRKDLPSRTSNVERKASQQQWGRGNFTEGKVPHIRIENGAAIEEIYTFGRILGKGSFGIVIEATDKETETKWAIKKVNKEKAGSSAVKLLEREVNILKSVKHEHIIHLEQVFETPKKMYLVMELCEDGELKEILDRKGHFSENETRWIIQSLASAIAYLHNNDIVHRDLKLENIMVKSSLIDDNNEINLNIKVTDFGLAVKKQSRSEAMLQATCGTPIYMAPEVISAHDYSQQCDIWSIGVVMYMLLRGEPPFLASSEEKLFELIRKGELHFENAVWNSISDCAKSVLKQLMKVDPAHRITAKELLDNQWLTGNKLSSVRPTNVLEMMKEWKNNPESVEENTTEEKNKPSTEEKLKSYQPWGNVPDANYTSDEEEEKQSTAYEKQFPATSKDNFDMCSSSFTSSKLLPAEIKGEMEKTPVTPSQGTATKYPAKSGALSRTKKKL

SEQ ID NO: 36729 - protein, 211 aa, Homo sapiens
  REGION 1..211: note = ENSP00000436905
AESLISLERKKEKNINRDITSRKDLPSRTSNVERKASQQQWGRGNFTEGKVPHIRIENGAAIEAGSSAVKLLEREVNILKSVKHEHIIHLEQVFETPKKMYLVMELCEDGELKEILDRKGHFSENETRWIIQSLASAIAYLHNNDIVHRDLKLENIMVKSSLIDDNNEINLNIKVTDFGLAVKKQSRSEAMLQATCGTPIYMAPEVISAHD

SEQ ID NO: 36730 - protein, 215 aa, Homo sapiens
  REGION 1..215: note = ENSP00000391362
MSQTSSIGSAESLISLERKKEKNINRDITSRKDLPSRTSNVERKASQQQWGRGNFTEGKVPHIRIENGAAIEEIYTFGRILGKGSFGIVIEATDKETETKWAIKKVNKEKAGSSAVKLLEREVNILKSVKHEHIIHLEQVFETPKKMYLVMELCEDGELKEILDRKGHFSENETRWIIQSLASAIAYLHNNDIVHRDLKLENIMVKSSLIDDNNE

SEQ ID NO: 36731 - protein, 191 aa, Homo sapiens
  REGION 1..191: note = ENSP00000411510
MSQTSSIGSAESLISLERKKEKNINRDITSRKDLPSRTSNVERKASQQQWGRGNFTEGKVPHIRIENGAAIEEIYTFGRILGKGSFGIVIEATDKETETKWAIKKVNKEKAGSSAVKLLEREVNILKSVKHEHIIHLEQVFETPKKMYLVMELCEDGELKEILDRKGHFSENETRWIIQSLASAIAYLHNN

SEQ ID NO: 36732 - protein, 171 aa, Homo sapiens
  REGION 1..171: note = ENSP00000403599
MADSGLDKKSTKCPDCSSASQKDVLCVCSSKTRVPPVLVVEMSQTSSIGSAESLISLERKKEKNINRDITSRKDLPSRTSNVERKASQQQWGRGNFTEGKVPHIRIENGAAIEEIYTFGRILGKGSFGIVIEATDKETETKWAIKKVNKEKAGSSAVKLLEREVNILKSVK

SEQ ID NO: 36733 - protein, 63 aa, Homo sapiens
  REGION 1..63: note = ENSP00000397569
MADSGLDKKSTKCPDCSSASQKDVLCVCSSKTRVPPVLVVEMSQTSSIGSAESLISLERKKEK

SEQ ID NO: 36734 - protein, 37 aa, Homo sapiens
  REGION 1..37: note = ENSP00000397874
MADSGLDKKSTKCPDCSSASQKDVLCVCSSKTRVPPV

SEQ ID NO: 36735 - protein, 29 aa, Homo sapiens
  REGION 1..29: note = ENSP00000432822
MADSGLDKKSTKCPDCSSASQKDVLCVCS

SEQ ID NO: 36736 - protein, 131 aa, Homo sapiens
  REGION 1..131: note = ENSP00000437856
MAMTAGTTTTFPMSNHTRERVTVAKLTLENFYSNLILQHEERETRQKKLEVAMEEEGLADEEKKLRRSQHARKETEFLRLKRTRLGLDDFESLKVIGRGAFGEVRLVQKKDTGHIYAMKILRKSDMLEKEQ

SEQ ID NO: 36737 - protein, 464 aa, Homo sapiens
  REGION 1..464: note = ENSP00000373684
MAMTAGTTTTFPMSNHTRERVTVAKLTLENFYSNLILQHEERETRQKKLEVAMEEEGLADEEKKLRRSQHARKETEFLRLKRTRLGLDDFESLKVIGRGAFGEVRLVQKKDTGHIYAMKILRKSDMLEKEQVAHIRAERDILVEADGAWVVKMFYSFQDKRNLYLIMEFLPGGDMMTLLMKKDTLTEEETQFYISETVLAIDAIHQLGFIHRDIKPDNLLLDAKGHVKLSDFGLCTGLKKAHRTEFYRNLTHNPPSDFSFQNMNSKRKAETWKKNRRQLAYSTVGTPDYIAPEVFMQTGYNKLCDWWSLGVIMYEMLIGYPPFCSETPQETYRKVMNWKETLVFPPEVPISEKAKDLILRFCIDSENRIGNSGVEEIKGHPFFEGVDWEHIRERPAAIPIEIKSIDDTSNFDDFPESDILQPVPNTTEPDYKSKDWVFLNYTYKRFEGLTQRGSIPTYMKAGKL

SEQ ID NO: 36738 - protein, 213 aa, Homo sapiens
  REGION 1..213: note = ENSP00000439457
MAMTAGTTTTFPMSNHTRERVTVAKLTLENFYSNLILQHEERETRQKKLEVAMEEEGLADEEVRLVQKKDTGHIYAMKILRKSDMLEKEQVAHIRAERDILVEADGAWVVKMFYSFQDKRNLYLIMEFLPGGDMMTLLMKKDTLTEEETQFYISETVLAIDAIHQLGFIHRDIKPDNLLLDAKGHVKLSDFGLCTGLKKAHRTEFYRNLTHNP

SEQ ID NO: 36739 - protein, 64 aa, Homo sapiens
  REGION 1..64: note = ENSP00000445898
MAMTAGTTTTFPMSNHTRERVTVAKLTLENFYSNLILQHEERETRQKKLEVAMEEEGLADEEVM

SEQ ID NO: 36740 - protein, 94 aa, Homo sapiens
  REGION 1..94: note = ENSP00000443838
MAMTAGTTTTFPMSNHTRERVTVAKLTLENFYSNLILQHEERETRQKKLEVAMEEEGLADEEKKLRRSQHARKETEFLRLKRTRLGLDDFESLK

SEQ ID NO: 36741 - protein, 56 aa, Homo sapiens
  REGION 1..56: note = ENSP00000443456
MAMTAGTTTTFPMSNHTRERVTVAKLTLENFYSNLILQHEERETRGENWKSFNKQH

SEQ ID NO: 36742 - protein, 131 aa, Homo sapiens; identical to SEQ ID NO: 36736
  REGION 1..131: note = ENSP00000442253

SEQ ID NO: 36743 - protein, 131 aa, Homo sapiens; identical to SEQ ID NO: 36736
  REGION 1..131: note = ENSP00000440279

SEQ ID NO: 36744 - protein, 89 aa, Homo sapiens
  REGION 1..89: note = ENSP00000385174
  VARIANT 1: note = Any amino acid
XQKKLEVAMEEEGLADEEKKLRRSQHARKETEFLRLKRTRLGLDDFESLKVIGRGAFGEVRLVQKKDTGHIYAMKILRKSDMLEKEQVT

SEQ ID NO: 36745 - protein, 87 aa, Homo sapiens
  REGION 1..87: note = ENSP00000443961
YISETVLAIDAIHQLGFIHRDIKPDNLLLDAKGHVKLSDFGLCTGLKKAHRTEFYRNLTHNPPSDFYVYVFSFCGEHFSLVITIPYC

SEQ ID NO: 36746 - protein, 216 aa, Homo sapiens
  REGION 1..216: note = ENSP00000342538
MTLAAYKEKMKELPLVSLFCSCFLADPLNKSSYKYEGWCGRQCRRKDESQRKDSADWRERRAQADTVDLNWCVISDMEVIELNKCTSGQSFEVILKPPSFDGVPEFNASLPRRRDPSLEEIQKKLEAAEERRKYQEAELLKHLAEKREHEREVIQKAIEENNNFIKMAKEKLAQKMESNKENREAHLAAMLERLQEKDKHAEEVRKNKELKEEASR

SEQ ID NO: 36747 - protein, 167 aa, Homo sapiens
  REGION 1..167: note = ENSP00000428474
MKELPLVSLFCSCFLADPLNKSSYKYEADTVDLNWCVISDMEVIELNKCTSGQSFEVILKPPSFDGVPEFNASLPRRRDPSLEEIQKKLEAAEERRKYQEAELLKHLAEKREHEREVIQKAIEENNNFIKMAKEKLAQKMESNKENREAHLAAMLERLQEKEPPAAR

SEQ ID NO: 36748 - protein, 189 aa, Homo sapiens
  REGION 1..189: note = ENSP00000265770
MTLAAYKEKMKELPLVSLFCSCFLADPLNKSSYKYEADTVDLNWCVISDMEVIELNKCTSGQSFEVILKPPSFDGVPEFNASLPRRRDPSLEEIQKKLEAAEERRKYQEAELLKHLAEKREHEREVIQKAIEENNNFIKMAKEKLAQKMESNKENREAHLAAMLERLQEKDKHAEEVRKNKELKEEASR

SEQ ID NO: 36749 - protein, 203 aa, Homo sapiens
  REGION 1..203: note = ENSP00000428428
MTLAAYKEKMKELPLVSLFCSCFLADPLNKSSYKYEGWCGRQCRRKDESQRKDSADWRERRAQADTVDLNWCVISDMEVIELNKCTSGQSFEVILKPPSFDGVPEFNASLPRRRDPSLEEIQKKLEAAEERRKYQEAELLKHLAEKREHEREVIQKAIEENNNFIKMAKEKLAQKMESNKENREAHLAAMLERLQEKEPPAAR

SEQ ID NO: 36750 - protein, 231 aa, Homo sapiens
  REGION 1..231: note = ENSP00000430699
MTLAAYKEKMKELPLVSLFCSCFLADPLNKSSYKYEADTVDLNWCVISDMEVIELNKCTSGQSFEVILKPPSFDGVPEFNASLPRRRDPSLEEIQKKLEAAEERRKYQEAELLKHLAEKREHEREVIQKAIEENNNFIKMAKEKLAQKMESNKENREAHLAAMLERLQEKVRGPWLERSFLGHAVFLLQQVCGDLLIISGRKQPQAKIRIFFLGRIFREFRRMIREVRGKK

SEQ ID NO: 36751 - protein, 258 aa, Homo sapiens
  REGION 1..258: note = ENSP00000430389
MTLAAYKEKMKELPLVSLFCSCFLADPLNKSSYKYEGWCGRQCRRKDESQRKDSADWRERRAQADTVDLNWCVISDMEVIELNKCTSGQSFEVILKPPSFDGVPEFNASLPRRRDPSLEEIQKKLEAAEERRKYQEAELLKHLAEKREHEREVIQKAIEENNNFIKMAKEKLAQKMESNKENREAHLAAMLERLQEKVRGPWLERSFLGHAVFLLQQVCGDLLIISGRKQPQAKIRIFFLGRIFREFRRMIREVRGKK

SEQ ID NO: 36752 - protein, 735 aa, Homo sapiens
  REGION 1..735: note = ENSP00000385273
MCSTNPGKWVTFDDDPAVQSSQKSKNFPLENQGVCRPNGLKLNLPGLREFPSGSSSTSSTPLSSPIVDFYFSPGPPSNSPLSTPTKDFPGFPGIPKAGTHVLYPIPESSSDSPLAISGGESSLLPTRPTCLSHALLPSDHSCTHPTPKVGLPDEVNPQQAESLGFQSDDLPQFQYFREDCAFSSPFWKDEGSDSHFTLDPPGSKKMFSSRNKEMPIDQKSLNKCSLNYICEKLEHLQSAENQDSLRSLSMHCLCAEENASSFVPHTLFRSQPKSGWSFMLRIPEKKNMMSSRQWGPIFLKVLPGGILQMYYEQGLEKPFKEIQLDPYCRLSEPKVENFSVAGKIHTVKIEHVSYTEKRKYHSKTEVVHEPDIEQMLKLGSTSYHDFLDFLTTVEEELMKLPAVSKPKKNYEEQEISLEIVDNFWGKVTKEGKFVESAVITQIYCLCFVNGNLECFLTLNDLELPKRDESYYEKDSEKKGIDILDYHFHKCVNVQEFEQSRIIKFVPLDACRFELMRFKTLYNGDNLPFSLKSVVVVQGAYVELQAFVNMASLAQRSSYAGSLRSCDNIRIHFPVPSQWIKALWTMNLQRQKSLKAKMNRRACLGSLQELESEPVIQVTVGSAKYESAYQAVVWKIDRLPDKNSSLDHPHCLSYKLELGSDQEIPSDWYPFATVQFSVPDTCASRTEVRSLGVESDVQPQKHVQQRACYNIQVEIEKKWIKIDGEDPDKIGDCITQ

SEQ ID NO: 36753 - protein, 735 aa, Homo sapiens; identical to SEQ ID NO: 36752
  REGION 1..735: note = ENSP00000384615

SEQ ID NO: 36754 - protein, 93 aa, Homo sapiens
  REGION 1..93: note = ENSP00000399868
RSSYAGSLRSCDNIRIHFPVPSQWIKALWTMNLQRQKSLKAKMNRRACLGSLQELESEPVIQVTVGSAKYESAYQAVVWKIDRLPDKNSIFRA

SEQ ID NO: 36755 - protein, 920 aa, Homo sapiens
  REGION 1..920: note = ENSP00000450857
MTTLDHVIATHQSEWVSFNEEPPFPAHSQGGTEEHLPGLSSSPDQSESSSGENHVVDGGSQDHSHSEQDDSSEKMGLISEAASPPGSPEQPPPDLASAISNWVQFEDDTPWASTSPPHQETAETALPLTMPCWTCPSFDSLGRCPLTSESSWTTHSEDTSSPSFGCSYTDLQLINAEEQTSGQASGADSTDNSSSLQEDEEVEMEAISWQASSPAMNGHPAPPVTSARFPSWVTFDDNEVSCPLPPVTSPLKPNTPPSASVIPDVPYNSMGSFKKRDRPKSTLMNFSKVQKLDISSLNRTPSVTEASPWRATNPFLNETLQDVQPSPINPFSAFFEEQERRSQNSSISSTTGKSQRDSLIVIYQDAISFDDSSKTQSHSDAVEKLKQLQIDDPDHFGSATLPDDDPVAWIELDAHPPGSARSQPRDGWPMMLRIPEKKNIMSSRHWGPIFVKLTDTGYLQLYYEQGLEKPFREFKLEICHEISEPRLQNYDENGRIHSLRIDRVTYKEKKKYQPKPAVAHTAEREQVIKLGTTNYDDFLSFIHAVQDRLMDLPVLSMDLSTVGLNYLEEEITVDVRDEFSGIVSKGDNQILQHHVLTRIHILSFLSGLAECRLGLNDILVKGNEIVLRQDIMPTTTTKWIKLHECRFHGCVDEDVFHNSRVILFNPLDACRFELMRFRTVFAEKTLPFTLRTATSVNGAEVEVQSWLRMSTGFSANRDPLTQVPCENVMIRYPVPSEWVKNFRRESVLGEKSLKAKVNRGASFGSTSVSGSEPVMRVTLGTAKYEHAFNSIVWRINRLPDKNSASGHPHCFFCHLELGSDREVPSRFANHVNVEFSMPTTSASKASVRSISVEDKTDVRKWVNYSAHYSYQTTETDNLPNPLYCSCLPHTDLKRGSKRVVKIRWNASLEVPLASSIRTMV

SEQ ID NO: 36756 - protein, 106 aa, Homo sapiens
  REGION 1..106: note = ENSP00000450577
  VARIANT 1: note = Any amino acid
XRINRLPDKNSASGHPHCFFCHLELGSDREVPSRFANHVNVEFSMPTTSASKASVRSISVEDKTDVRKWVNYSAHYSYQVEIEQKKSLKPDFEGDEMENPKECGVQ

SEQ ID NO: 36757 - protein, 905 aa, Homo sapiens
  REGION 1..905: note = ENSP00000267540
MTTLDHVIATHQSEWVSFNEEPPFPAHSQGGTEEHLPGLSSSPDQSESSSGENHVVDGGSQDHSHSEQDDSSEKMGLISEAASPPGSPEQPPPDLASAISNWVQFEDDTPWASTSPPHQETAETALPLTMPCWTCPSFDSLGRCPLTSESSWTTHSEDTSSPSFGCSYTDLQLINAEEQTSGQASGADSTDNSSSLQEDEEVEMEAISWQASSPAMNGHPAPPVTSARFPSWVTFDDNEVSCPLPPVTSPLKPNTPPSASVIPDVPYNSMGSFKKRDRPKSTLMNFSKVQKLDISSLNRTPSVTEASPWRATNPFLNETLQDVQPSPINPFSAFFEEQERRSQNSSISSTTGKSQRDSLIVIYQDAISFDDSSKTQSHSDAVEKLKQLQIDDPDHFGSATLPDDDPVAWIELDAHPPGSARSQPRDGWPMMLRIPEKKNIMSSRHWGPIFVKLTDTGYLQLYYEQGLEKPFREFKLEICHEISEPRLQNYDENGRIHSLRIDRVTYKEKKKYQPKPAVAHTAEREQVIKLGTTNYDDFLSFIHAVQDRLMDLPVLSMDLSTVGLNYLEEEITVDVRDEFSGIVSKGDNQILQHHVLTRIHILSFLSGLAECRLGLNDILVKGNEIVLRQDIMPTTTTKWIKLHECRFHGCVDEDVFHNSRVILFNPLDACRFELMRFRTVFAEKTLPFTLRTATSVNGAEVEVQSWLRMSTGFSANRDPLTQVPCENVMIRYPVPSEWVKNFRRESVLGEKSLKAKVNRGASFGSTSVSGSEPVMRVTLGTAKYEHAFNSIVWRINRLPDKNSASGHPHCFFCHLELGSDREVPSRFANHVNVEFSMPTTSASKASVRSISVEDKTDVRKWVNYSAHYSYQVALGSIWLMLPTPFVHPTTLPLLFLLAMLTMFAW

SEQ ID NO: 36758 - protein, 49 aa, Homo sapiens
  REGION 1..49: note = ENSP00000450990
MTTLDHVIATHQSEWVSFNEEPPFPAHSQGGTEEHLPGLSSSPDQSESS

SEQ ID NO: 36759 - skipped

SEQ ID NO: 36760 - protein, 920 aa, Homo sapiens; identical to SEQ ID NO: 36755
  REGION 1..920: note = ENSP00000477736

SEQ ID NO: 36761 - protein, 195 aa, Homo sapiens
  REGION 1..195: note = ENSP00000422118
MPGKMEKFLQIAPHSLAIVLGPAEAPAGERPGAARPAPPAQPRQLARHHIGYEIFADFKAENMQHFWNKKVTAAVAETFFLGWIDEQVLLIQGKEEHLEALREGWTRRALRPPSGFHIRCLGDVSPISMSPISQSQFIPLGEILCLAISAMNSARKPVTQEALMEHLTTCFPVLGRAWLPTHQALLKVTVVRTPL

SEQ ID NO: 36762 - protein, 926 aa, Homo sapiens
  REGION 1..926: note = ENSP00000311257
MKKTRSTTLRRAWPSSDFSDRASDRMRSRSEKDYRLHKRFPAAFAPQASRGYMTSGDVSPISMSPISQSQFIPLGEILCLAISAMNSARKPVTQEALMEHLTTCFPGVPTPSQEILRHTLNTLVRERKIYPTPDGYFIVTPQTYFITPSLIRTNSKWYHLDERIPDRSQCTSPQPGTITPSASGCVRERTLPRNHCDSCHCCREDVHSTHAPTLQRKSAKDCKDPYCPPSLCQVPPTEKSKSTVNFSYKTETLSKPKDSEKQSKKFGLKLFRLSFKKDKTKQLANFSAQFPPEEWPLRDEDTPATIPREVEMEIIRRINPDLTVENVMRHTALMKKLEEEKAQRSKAGSSAHHSGRSKKSRTHRKSHGKSRSHSKTRVSKGDPSDGSHLDIPAEREYDFCDPLTRVPREGCFIIEHKGDNFIMHSNTNVLESHFPMTPEWDVSGELAKRRTEMPFPEPSRGSSHSKVHRSHSHTQDRRSRNERSNKAKERSRSMDNSKGPLGASSLGTPEDLAEGCSQDDQTPSQSYIDDSTLRPAQTVSLQRAHISSTSYKEVCIPEIVSGSKEPSSACSLLEPGKPPESLPSYGELNSCPTKTATDDYFQCNTSSETVLTAPSPLGKNKEDHDTLTLAEGVKKLSPSDRQVPHSSREPVGHKEESPKGPGGGPAASGGVAEGIANGRLVQHHGAEPSSLDKRKEIFSKDTLFKPLHSTLSVNSYHKSSLSLLKSHPKTPADTLPGRCEKLEPSLGTSAAQAMPASQRQQESGGNQEASFDYYNVSDDDDSEEGANKNTEEEKNREDVGTMQWLLEREKERDLQRKFEKNLTLLAPKETDSSSNQRATHSARLDSMDSSSITVDSGFNSPRTRESLASNTSSIVESNRRQNPALSPAHGGAGPAFNFRASAEPPTNEAEKLQKPSNCLQASVTSV

SEQ ID NO: 36763 - protein, 40 aa, Homo sapiens
  REGION 1..40: note = ENSP00000425388
  VARIANT 1: note = Any amino acid
XMLSLSQGCNEVMYHPSVCLPSVSLSLFHSGRSSAWPSQQ

SEQ ID NO: 36764 - protein, 219 aa, Homo sapiens
  REGION 1..219: note = ENSP00000426209
  VARIANT 1: note = Any amino acid
XSSREPVGHKEESPKGPGGGPAASGGVAEGIANGRLVQHHGAEPSSLDKRKEIFSKDTLFKPLHSTLSVNSYHKSSLSLLKSHPKTPADTLPGRCEKLEPSLGTSAAQAMPASQRQQESGGNQEASFDYYNVSDDDDSEEGANKNTEEEKNREDVGTMQWLLEREKERDLQRKFEKNLTLLAPKETDSSSNQRATHSARLDSMDSSSITVDSGFNSPRN

SEQ ID NO: 36765 - protein, 46 aa, Homo sapiens
  REGION 1..46: note = ENSP00000445693
MRQTPLTCSGHTRPVVDLAFSGITPYGYFLISACKAKCGMLSQEMN

SEQ ID NO: 36766 - protein, 363 aa, Homo sapiens
  REGION 1..363: note = ENSP00000025399
MAMRQTPLTCSGHTRPVVDLAFSGITPYGYFLISACKGAGQHLPRLSGQHDGKPMLRQGDTGDWIGTFLGHKGAVWGATLNKDATKAATAAADFTAKVWDAVSGDELMTLAHKHIVKTVDFTQDSNYLLTGGQDKLLRIYDLNKPEAEPKEISGHTSGIKKALWCSEDKQILSADDKTVRLWDHATMTEVKSLNFNMSVSSMEYIPEGEILVITYGRSIAFHSAVSLDPIKSFEAPATINSASLHPEKEFLVAGGEDFKLYKYDYNSGEELESYKGHFGPIHCVRFSPDGELYASGSEDGTLRLWQTVVGKTYGLWKCVLPEEDSGELAKPKIGFPETTEEELEEIASENSDCIFPSAPDVKA

SEQ ID NO: 36767 - protein, 350 aa, Homo sapiens
  REGION 1..350: note = ENSP00000392270
MAMRQTPLTCSGHTRPVVDLAFSGITPYGYFLISACKDGKPMLRQGDTGDWIGTFLGHKGAVWGATLNKDATKAATAAADFTAKVWDAVSGDELMTLAHKHIVKTVDFTQDSNYLLTGGQDKLLRIYDLNKPEAEPKEISGHTSGIKKALWCSEDKQILSADDKTVRLWDHATMTEVKSLNFNMSVSSMEYIPEGEILVITYGRSIAFHSAVSLDPIKSFEAPATINSASLHPEKEFLVAGGEDFKLYKYDYNSGEELESYKGHFGPIHCVRFSPDGELYASGSEDGTLRLWQTVVGKTYGLWKCVLPEEDSGELAKPKIGFPETTEEELEEIASENSDCIFPSAPDVKA

SEQ ID NO: 36768 - protein, 95 aa, Homo sapiens
  REGION 1..95: note = ENSP00000445814
  VARIANT 1: note = Any amino acid
XKEFLVAGGEDFKLYKYDYNSGEELESYKGHFGPIHCVRFSPDGELYASGSEDGTLRLWQTVVGKTYGLWKCVLPEEIASENSDCIFPSAPDVKA

SEQ ID NO: 36769 - protein, 1775 aa, Homo sapiens
  REGION 1..1775: note = ENSP00000401513
MALSLWPLLLLLLLLLLLSFAVTLAPTGPHSLDPGLSFLKSLLSTLDQAPQGSLSRSRFFTFLANISSSFEPGRMGEGPVGEPPPLQPPALRLHDFLVTLRGSPDWEPMLGLLGDMLALLGQEQTPRDFLVHQAGVLGGLVEVLLGALVPGGPPTPTRPPCTRDGPSDCVLAADWLPSLLLLLEGTRWQALVQVQPSVDPTNATGLDGREAAPHFLQGLLGLLTPTGELGSKEALWGGLLRTVGAPLYAAFQEGLLRVTHSLQDEVFSILGQPEPDTNGQCQGGNLQQLLLWGVRHNLSWDVQALGFLSGSPPPPPALLHCLSTGVPLPRASQPSAHISPRQRRAITVEALCENHLGPAPPYSISNFSIHLLCQHTKPATPQPHPSTTAICQTAVWYAVSWAPGAQGWLQACHDQFPDEFLDAICSNLSFSALSGSNRRLVKRLCAGLLPPPTSCPEGLPPVPLTPDIFWGCFLENETLWAERLCGEASLQAVPPSNQAWVQHVCQGPTPDVTASPPCHIGPCGERCPDGGSFLVMVCANDTMYEVLVPFWPWLAGQCRISRGGNDTCFLEGLLGPLLPSLPPLGPSPLCLTPGPFLLGMLSQLPRCQSSVPALAHPTRLHYLLRLLTFLLGPGAGGAEAQGMLGRALLLSSLPDNCSFWDAFRPEGRRSVLRTIGEYLEQDEEQPTPSGFEPTVNPSSGISKMELLACFSPVLWDLLQREKSVWALQILVQAYLHMPPENLQQLVLSAEREAAQGFLTLMLQGKLQGKLQVPPSEEQALGRLTALLLQRYPRLTSQLFIDLSPLIPFLAVSDLMRFPPSLLANDSVLAAIRDYSPGMRPEQKEALAKRLLAPELFGEVPAWPQELLWAVLPLLPHLPLENFLQLSPHQIQALEDSWPAAGLGPGHARHVLRSLVNQSVQDGEEQVRRLGPLACFLSPEELQSLVPLSDPTGPVERGLLECAANGTLSPEGRVAYELLGVLRSSGGAVLSPRELRVWAPLFSQLGLRFLQELSEPQLRAMLPVLQGTSVTPAQAVLLLGRLLPRHDLSLEELCSLHLLLPGLSPQTLQAIPRRVLVGACSCLAPELSRLSACQTAALLQTFRVKDGVKNMGTTGAGPAVCIPGQPIPTTWPDCLLPLLPLKLLQLDSLALLANRRRYWELPWSEQQAQFLWKKMQVPTNLTLRNLQALGTLAGGMSCEFLQQINSMVDFLEVVHMIYQLPTRVRGSLRACIWAELQRRMAMPEPEWTTVGPELNGLDSKLLLDLPIQLMDRLSNESIMLVVELVQRAPEQLLALTPLHQAALAERALQNLAPKETPVSGEVLETLGPLVGFLGTESTRQIPLQILLSHLSQLQGFCLGETFATELGWLLLQESVLGKPELWSQDEVEQAGRLVFTLSTEAISLIPREALGPETLERLLEKQQSWEQSRVGQLCREPQLAAKKAALVAGVVRPAAEDLPEPVPNCADVRGTFPAAWSATQIAEMELSDFEDCLTLFAGDPGLGPEELRAAMGKAKQLWGPPRGFRPEQILQLGRLLIGLGDRELQELILVDWGVLSTLGQIDGWSTTQLRIVVSSFLRQSGRHVSHLDFVHLTALGYTLCGLRPEELQHISSWEFSQAALFLGTLHLQCSEEQLEVLAHLLVLPGGFGPISNWGPEIFTEIGTIAAGIPDLALSALLRGQIQGVTPLAISVIPPPKFAVVFSPIQLSSLTSAQAVAVTPEQMAFLSPEQRRAVAWAQHEGKESPEQQGRSTAWGLQDWSRPSWSLVLTISFLGHLL

SEQ ID NO: 36770 - protein, 969 aa, Homo sapiens
  REGION 1..969: note = ENSP00000415991
MALSLWPLLLLLLLLLLLSFAVTLAPTGPHSLDPGLSFLKSLLSTLDQAPQGSLSRSRFFTFLANISSSFEPGRMGEGPVGEPPPLQPPALRLHDFLVTLRGSPDWEPMLGLLGDMLALLGQEQTPRDFLVHQAGVLGGLVEVLLGALVPGGPPTPTRPPCTRDGPSDCVLAADWLPSLLLLLEGTRWQALVQVQPSVDPTNATGLDGREAAPHFLQGLLGLLTPTGELGSKEALWGGLLRTVGAPLYAAFQEGLLRVTHSLQDEVFSILGQPEPDTNGQCQGGNLQQLLLWGVRHNLSWDVQALGFLSGSPPPPPALLHCLSTGVPLPRASQPSAHISPRQRRAITVEALCENHLGPAPPYSISNFSIHLLCQHTKPATPQPHPSTTAICQTAVWYAVSWAPGAQGWLQACHDQFPDEFLDAICSNLSFSALSGSNRRLVKRLCAGLLPPPTSCPEGLPPVPLTPDIFWGCFLENETLWAERLCGEASLQAVPPSNQAWVQHVCQGPTPDVTASPPCHIGPCGERCPDGGSFLVMVCANDTMYEVLVPFWPWLAGQCRISRGGNDTCFLEGLLGPLLPSLPPLGPSPLCLTPGPFLLGMLSQLPRCQSSVPALAHPTRLHYLLRLLTFLLGPGAGGAEAQGMLGRALLLSSLPDNCSFWDAFRPEGRRSVLRTIGEYLEQDEEQPTPSGFEPTVNPSSGISKMELLACFSPVLWDLLQREKSVWALQILVQAYLHMPPENLQQLVLSAEREAAQGFLTLMLQGKLQGKLQVPPSEEQALGRLTALLLQRYPRLTSQLFIDLSPLIPFLAVSDLMRFPPSLLANDSVQQGYRGSEENSLEEDKGLRPMTPRSLAAIRDYSPGMRPEQKEALAKRLLAPELFGEVPAWPQELLWAVLPLLPHLPLENFLQLSPHQIQALEDSWPAAGLGPGHARHVLRSLVNQSVQDGEEQVRRWHMNFWVCCAHLEERC

SEQ ID NO: 36771 - protein, 351 aa, Homo sapiens
  REGION 1..351: note = ENSP00000394866
MALSLWPLLLLLLLLLLLSFAVTLAPTGPHSLDPGLSFLKSLLSTLDQAPQGSLSRSRFFTFLANISSSFEPGRMGEGPVGEPPPLQPPALRLHDFLVTLRGSPDWEPMLGLLGDMLALLGQEQTPRDFLVHQAGVLGGLVEVLLGALVPGGPPTPTRPPCTRDGPSDCVLAADWLPSLLLLLEGTRWQALVQVQPSVDPTNATGLDGREAAPHFLQGLLGLLTPTGELGSKEALWGGLLRTVGAPLYAAFQEGLLRVTHSLQDEVFSILGQPEPDTNGQCQGGNLQQLLLWGVRHNLSWDVQALGFLSGSPPPPPALLHCLSTGVPLPRASQPSAHISPRQRRAITVEAL

SEQ ID NO: 36772 - protein, 119 aa, Homo sapiens
  REGION 1..119: note = ENSP00000394755
  VARIANT 1: note = Any amino acid
XSLAAIRDYSPGMRPEQKEALAKRLLAPELFGEVPAWPQELLWAVLPLLPHLPLENFLQLSPHQIQALEDSWPAAGLGPGHARHVLRSLVNQSVQDGEEQVRRWHMNFWVCCAHLEERC

SEQ ID NO: 36773 - protein, 663 aa, Homo sapiens
  REGION 1..663: note = ENSP00000407303
TFLANISSSFEPGRMGEGPVGEPPPLQPPALRLHDFLVTLRGSPDWEPMLGLLGDMLALLGQEQTPRDFLVHQAGVLGGLVEVLLGALVPGGPPTPTRPPCTRDGPSDCVLAADWLPSLLLLLEGTRWQALVQVQPSVDPTNATGLDGREAAPHFLQGLLGLLTPTGELGSKEALWGGLLRTVGAPLYAAFQEGLLRVTHSLQDEVFSILGQPEPDTNGQCQGGNLQQLLLWGVRHNLSWDVQALGFLSGSPPPPPALLHCLSTGVPLPRASQPSAHISPRQRRAITVEALCENHLGPAPPYSISNFSIHLLCQHTKPATPQPHPSTTAICQTAVWYAVSWAPGAQGWLQACHDQFPDEFLDAICSNLSFSALSGSNRRLVKRLCAGLLPPPTSCPEGLPPVPLTPDIFWGCFLENETLWAERLCGEASLQAVPPSNQAWVQHVCQGPTPDVTASPPCHIGPCGERCPDGGSFLVMVCANDTMYEVLVPFWPWLAGQCRISRGGNDTCFLEGLLGPLLPSLPPLGPSPLCLTPGPFLLGMLSQLPRCQSSVPALAHPTRLHYLLRLLTFLLGPGAGGAEAQGMLGRALLLSSLPDNCSFWDAFRPEGRRSVLRTIGEYLEQDEEQPTPSGFEPTVNPSSGISKMELLACFSVSALPEGKLLEQ

SEQ ID NO: 36774 - protein, 1002 aa, Homo sapiens
  REGION 1..1002: note = ENSP00000440413
MELLACFSPVLWDLLQREKSVWALQILVQAYLHMPPENLQQLVLSAEREAAQGFLTLMLQGKLQGKLQVPPSEEQALGRLTALLLQRYPRLTSQLFIDLSPLIPFLAVSDLMRFPPSLLANDSVQQGYRGSEENSLEEDKGLRPMTPRSLAAIRDYSPGMRPEQKEALAKRLLAPELFGEVPAWPQELLWAVLPLLPHLPLENFLQLSPHQIQALEDSWPAAGLGPGHARHVLRSLVNQSVQDGEEQVRRLGPLACFLSPEELQSLVPLSDPTGPVERGLLECAANGTLSPEGRVAYELLGVLRSSGGAVLSPRELRVWAPLFSQLGLRFLQELSEPQLRAMLPVLQGTSVTPAQAVLLLGRLLPRHDLLQLDSLALLANRRRYWELPWSEQQAQFLWKKMQVPTNLTLRNLQALGTLAGGMSCEFLQQINSMVDFLEVVHMIYQLPTRVRGSLRACIWAELQRRMAMPEPEWTTVGPELNGLDSKLLLDLPIQLMDRLSNESIMLVVELVQRAPEQLLALTPLHQAALAERALQNLAPKETPVSGEVLETLGPLVGFLGTESTRQIPLQILLSHLSQLQGFCLGETFATELGWLLLQESVLGKPELWSQDEVEQAGRLVFTLSTEAISLIPREALGPETLERLLEKQQSWEQSRVGQLCREPQLAAKKAALVAGVVRPAAEDLPEPVPNCADVRGTFPAAWSATQIAEMELSDFEDCLTLFAGDPGLGPEELRAAMGKAKQLWGPPRGFRPEQILQLGRLLIGLGDRELQELILVDWGVLSTLGQIDGWSTTQLRIVVSSFLRQSGRHVSHLDFVHLTALGYTLCGLRPEELQHISSWEFSQAALFLGTLHLQCSEEQLEVLAHLLVLPGGFGPISNWGPEIFTEIGTIAAGIPDLALSALLRGQIQGVTPLAISVIPPPKFAVVFSPIQLSSLTSAQAVAVTPEQMAFLSPEQRRAVAWAQHEGKESPEQQGRSTAWGLQDWSRPSWSLVLTISFLGHLL

SEQ ID NO: 36775 - protein, 834 aa, Homo sapiens
  REGION 1..834: note = ENSP00000249344
MEDPAAPGTGGPPANGNGNGGGKGKQAAPKGREAFRSQRRESEGSVDCPTLEFEYGDADGHAAELSELYSYTENLEFTNNRRCFEEDFKTQVQGKEWLELEEDAQKAYIMGLLDRLEVVSRERRLKVARAVLYLAQGTFGECDSEVDVLHWSRYNCFLLYQMGTFSTFLELLHMEIDNSQACSSALRKPAVSIADSTELRVLLSVMYLMVENIRLERETDPCGWRTARETFRTELSFSMHNEEPFALLLFSMVTKFCSGLAPHFPIKKVLLLLWKVVMFTLGGFEHLQTLKVQKRAELGLPPLAEDSIQVVKSMRAASPPSYTLDLGESQLAPPPSKLRGRRGSRRQLLTKQDSLDIYNERDLFKTEEPATEEEEESAGDGERTLDGELDLLEQDPLVPPPPSQAPLSAERVAFPKGLPWAPKVRQKDIEHFLEMSRNKFIGFTLGQDTDTLVGLPRPIHESVKTLKQHKYISIADVQIKNEEELEKCPMSLGEEVVPETPCEILYQGMLYSLPQYMIALLKILLAAAPTSKAKTDSINILADVLPEEMPITVLQSMKLGIDVNRHKEIIVKSISTLLLLLLKHFKLNHIYQFEYVSQHLVFANCIPLILKFFNQNILSYITAKNSISVLDYPCCTIQDLPELTTESLEAGDNSQFCWRNLFSCINLLRLLNKLTKWKHSRTMMLVVFKSAPILKRALKVKQAMLQLYVLKLLKLQTKYLGRQWRKSNMKTMSAIYQKVRHRMNDDWAYGNDIDARPWDFQAEECTLRANIEAFNSRRYDRPQDSEFSPVDNCLQSVLGQRLDLPEDFHYSYELWLEREVFSQPICWEELLQNH

SEQ ID NO: 36776 - protein, 758 aa, Homo sapiens
  REGION 1..758: note = ENSP00000392393
MEDPAAPGTGGPPANGNGNGGGKGKQAAPKGREAFRSQRRESEGSVDCPTLEFEYGDADGHAAELSELYSYTENLEFTNNRRCFEEDFKTQVQGKEWLELEEDAQKAYIMGLLDRLEVVSRERRLKVARAVLYLAQGTFGECDSEVDVLHWSRYNCFLLYQMGTFSTFLELLHMEIDNSQACSSALRKPAVSIADSTELRVLLSVMYLMVENIRLERETDPCGWRTARETFRTELSFSMHNEEPFALLLFSMVTKFCSGLAPHFPIKKVLLLLWKVVMFTLGGFEHLQTLKVQKRAELGLPPLAEDSIQVVKSMRAASPPSYTLDLGESQLAPPPSKLRGRRGSRRQLLTKQDSLDIYNERDLFKTEEPATEEEEESAGDGERTLDGELDLLEQDPLVPPPPSQAPLSAERVAFPKGLPWAPKVRQKDIEHFLEMSRNKFIGFTLGQDTDTLVGLPRPIHESVKTLKQHKYISIADVQIKNEEELEKCPMSLGEEVVPETPCEILYQGMLYSLPQYMIALLKILLAAAPTSKAKTDSINILADVLPEEMPITVLQSMKLGIDVNRHKEIIVKSISTLLLLLLKHFKLNHIYQFEYVSQHLVFANCIPLILKFFNQNILSYITAKNSISVLDYPCCTIQDLPELTTESLEAGDNSQFCWRNLFSCINLLRLLNKLTKWKHSRTMMLVVFKSAPILKRALKVKQAMLQLYVLKLLKLQTKYLGRQWRKSNMKTMSAIYQKVRHRMNDDWAYGNGESSQSS

SEQ ID NO: 36777 - protein, 780 aa, Homo sapiens
  REGION 1..780: note = ENSP00000263918
MDEQAGPGVFFSNNHPGAGGAKGLGPLAEAAAAGDGAAAAGAARAQYSLPGILHFLQHEWARFEVERAQWEVERAELQAQIAFLQGERKGQENLKKDLVRRIKMLEYALKQERAKYHKLKYGTELNQGDMKPPSYDSDEGNETEVQPQQNSQLMWKQGRQLLRQYLQEVGYTDTILDVKSKRVRALLGFSSDVTDREDDKNQDSVVNGTEAEVKETAMIAKSELTDSASVLDNFKFLESAAADFSDEDEDDDVDGREKSVIDTSTIVRKKALPDSGEDRDTKEALKEFDFLVTSEEGDNESRSAGDGTDWEKEDQCLMPEAWNVDQGVITKLKEQYKKERKGKKGVKRPNRSKLQDMLANLRDVDELPSLQPSVGSPSRPSSSRLPEHEINRADEVEALTFPPSSGKSFIMGADEALESELGLGELAGLTVANEADSLTYDIANNKDALRKTWNPKFTLRSHFDGIRALAFHPIEPVLITASEDHTLKMWNLQKTAPAKKSTSLDVEPIYTFRAHKGPVLCVVMSSNGEQCYSGGTDGLIQGWNTTNPNIDPYDSYDPSVLRGPLLGHTDAVWGLAYSAAHQRLLSCSADGTLRLWNTTEVAPALSVFNDTKELGIPASVDLVSSDPSHMVASFSKGYTSIFNMETQQRILTLESNVDTTANSSCQINRVISHPTLPISITAHEDRHIKFYDNNTGKLIHSMVAHLEAVTSLAVDPNGLYLMSGSHDCSIRLWNLESKTCIQEFTAHRKKFEESIHDVAFHPSKCYIASAGADALAKVFV

SEQ ID NO: 36778 - protein, 731 aa, Homo sapiens
  REGION 1..731: note = ENSP00000368513
MDEQAGPGVFFSNNHPGAGGAKGLGPLAGAARAQYSLPGILHFLQHEWARFEVERAQWEVERAELQAQIAFLQGERKGQENLKKDLVRRIKMLEYALKQERAKYHKLKYGTELNQGDMKPPSYDSDEGNETEVQPQQNSQLMWKQGRQLLRQYLQEVGYTDTILDVKSKRVRALLGFSSDVTDREDDKNQDSVVNGTEAEVKETAMIAKSELTDSASVLDNFKFLESAAADFSDEDEDDDVDGREKSVIDTSTIVRKKALPDSGEDRDTKEALKEFDFLVTSEEGDNESRSAGDGTDWGPNRSKLQDMLANLRDVDELPSLQPSVGSPSRPSSSRLPEHEINRADEVEALTFPPSSGKSFIMGADEALESELGLGELAGLTVANEADSLTYDIANNKDALRKTWNPKFTLRSHFDGIRALAFHPIEPVLITASEDHTLKMWNLQKTAPAKKSTSLDVEPIYTFRAHKGPVLCVVMSSNGEQCYSGGTDGLIQGWNTTNPNIDPYDSYDPSVLRGPLLGHTDAVWGLAYSAAHQRLLSCSADGTLRLWNTTEVAPALSVFNDTKELGIPASVDLVSSDPSHMVASFSKGYTSIFNMETQQRILTLESNVDTTANSSCQINRVISHPTLPISITAHEDRHIKFYDNNTGKLIHSMVAHLEAVTSLAVDPNGLYLMSGSHDCSIRLWNLESKTCIQEFTAHRKKFEESIHDVAFHPSKCYIASAGADALAKVFV

SEQ ID NO: 36779 - protein, 302 aa, Homo sapiens
  REGION 1..302: note = ENSP00000259400
MSEDEEKVKLRRLEPAIQKFIKIVIPTDLERLRKHQINIEKYQRCRIWDKLHEEHINAGRTVQQLRSNIREIEKLCLKVRKDDLVLLKRMIDPVKEEASAATAEFLQLHLESVEELKKQFNDEETLLQPPLTRSMTVGGAFHTTEAEASSQSLTQIYALPEIPQDQNAAESWETLEADLIELSQLVTDFSLLVNSQQEKIDSIADHVNSAAVNVEEGTKNLGKAAKYKLAALPVAGALIGGMVGGPIGLLAGFKVAGIAAALGGGVLGFTGGKLIQRKKQKMMEKLTSSCPDLPSQTDKKCS

SEQ ID NO: 36780 - protein, 45 aa, Homo sapiens
  REGION 1..45: note = ENSP00000434323
MSEDEEKVKLRRLEPAIQKFIKIVIPTDLERLRKHQINIEKVYIH

SEQ ID NO: 36781 - protein, 41 aa, Homo sapiens
  REGION 1..41: note = ENSP00000433694
MSEDEEKVKLRRLEPAIQKFIKIVIPTDLERLRKHQINIEK

SEQ ID NO: 36782 - protein, 68 aa, Homo sapiens
  REGION 1..68: note = ENSP00000433701
MSEDEEKVKLRRLEPAIQKFIKIVIPTDLERLRKHQINIEKYQRCRIWDKLHEEHINAGRTVQFRNYI

SEQ ID NO: 36783 - protein, 141 aa, Homo sapiens
  REGION 1..141: note = ENSP00000436666
MSEDEEKVKLRRLEPAIQKFIKIVIPTDLERLRKHQINIEKYQRCRIWDKLHEEHINAGRTVQQLRSNIREIEKLCLKVRKDDLVLLKRMIDPVKEEASAATAEFLQLHLESVEELKKQFNDEETLLQPPLTRSMTVGGLN

SEQ ID NO: 36784 - protein, 302 aa, Homo sapiens; identical to SEQ ID NO: 36779
  REGION 1..302: note = ENSP00000435981

SEQ ID NO: 36785 - protein, 302 aa, Homo sapiens; identical to SEQ ID NO: 36779
  REGION 1..302: note = ENSP00000433484

SEQ ID NO: 36786 - protein, 41 aa, Homo sapiens; identical to SEQ ID NO: 36781
  REGION 1..41: note = ENSP00000434547

SEQ ID NO: 36787 - protein, 111 aa, Homo sapiens
  REGION 1..111: note = ENSP00000470313
MDHPSMRILSSCCKMSDILAEGITIVEDINKRREPIPSLEAIYLLSPTEKSVQALIKDFQGTPTFTYKAAHIFFTDTCPEPLFSELGRSRLAKVVKTLKEIHLAFLPYEAQ

SEQ ID NO: 36788 - protein, 169 aa, Homo sapiens
  REGION 1..169: note = ENSP00000471161
MAPSGLKAVVGEKILSGVIRSVKKDGEWKVLIMDHPSMRILSSCCKMSDILAEGITTCPEPLFSELGRSRLAKVVKTLKEIHLAFLPYEAQVFSLDAPHSTYNLYCPFRAEERTRQLEVLAQQIATLCATLQEYPAIRYRKGPEDTAQLAHAVLAKLNAFKADTPSLGE

SEQ ID NO: 36789 - protein, 604 aa, Homo sapiens
  REGION 1..604: note = ENSP00000413606
MAPSGLKAVVGEKILSGVIRSVKKDGEWKVLIMDHPSMRILSSCCKMSDILAEGITIVEDINKRREPIPSLEAIYLLSPTEKAQAQRVIHLPQSVQALIKDFQGTPTFTYKAAHIFFTDTCPEPLFSELGRSRLAKVVKTLKEIHLAFLPYEAQVFSLDAPHSTYNLYCPFRAEERTRQLEVLAQQIATLCATLQEYPAIRYRKGPEDTAQLAHAVLAKLNAFKADTPSLGEGPEKTRSQLLIMDRAADPVSPLLHELTFQAMAYDLLDIEQDTYRYETTGLSEAREKAVLLDEDDDLWVELRHMHIADVSKKVTELLRTFCESKRLTTDKANIKDLSQILKKMPQYQKELNKYSTHLHLADDCMKHFKGSVEKLCSVEQDLAMGSDAEGEKIKDSMKLIVPVLLDAAVPAYDKIRVLLLYILLRNGVSEENLAKLIQHANVQAHSSLIRNLEQLGGTVTNPGGSGTSSRLEPRERMEPTYQLSRWTPVIKDVMEDAVEDRLDRNLWPFVSDPAPTASSQAAVSARFGHWHKNKAGIEARAGPRLIVYVMGGVAMSEMRAAYEVTRATEGKWEVLIGSSHILTPTRFLDDLKALDKKLEDIALP

SEQ ID NO: 36790 - protein, 593 aa, Homo sapiens
  REGION 1..593: note = ENSP00000221283
MAPSGLKAVVGEKILSGVIRSVKKDGEWKVLIMDHPSMRILSSCCKMSDILAEGITIVEDINKRREPIPSLEAIYLLSPTEKSVQALIKDFQGTPTFTYKAAHIFFTDTCPEPLFSELGRSRLAKVVKTLKEIHLAFLPYEAQVFSLDAPHSTYNLYCPFRAEERTRQLEVLAQQIATLCATLQEYPAIRYRKGPEDTAQLAHAVLAKLNAFKADTPSLGEGPEKTRSQLLIMDRAADPVSPLLHELTFQAMAYDLLDIEQDTYRYETTGLSEAREKAVLLDEDDDLWVELRHMHIADVSKKVTELLRTFCESKRLTTDKANIKDLSQILKKMPQYQKELNKYSTHLHLADDCMKHFKGSVEKLCSVEQDLAMGSDAEGEKIKDSMKLIVPVLLDAAVPAYDKIRVLLLYILLRNGVSEENLAKLIQHANVQAHSSLIRNLEQLGGTVTNPGGSGTSSRLEPRERMEPTYQLSRWTPVIKDVMEDAVEDRLDRNLWPFVSDPAPTASSQAAVSARFGHWHKNKAGIEARAGPRLIVYVMGGVAMSEMRAAYEVTRATEGKWEVLIGSSHILTPTRFLDDLKALDKKLEDIALP

SEQ ID NO: 36791 - protein, 408 aa, Homo sapiens
  REGION 1..408: note = ENSP00000471327
MAPSGLKAVVGEKILSGVIRSVKKDGEWKVLIMDHPSMRILSSCCKMSDILAEGITIVEDINKRREPIPSLEAIYLLSPTEKSVQALIKDFQGTPTFTYKAAHIFFTDTCPEPLFSELGRSRLAKVVKTLKEIHLAFLPYEAQVFSLDAPHSTYNLYCPFRAEERTRQLEVLAQQIATLCATLQEYPAIRYRKGPEDTAQLAHAVLAKLNAFKADTPSLGEGPEKTRSQLLIMDRAADPVSPLLHELTFQAMAYDLLDIEQDTYRYETTGLSEAREKAVLLDEDDDLWVELRHMHIADVSKKVTELLRTFCESKRLTTDKANIKDLSQILKKMPQYQKELNKDLAMGSDAEGEKIKDSMKLIVPVLLDAAVPAYDKIRVLLLYILLRNATPLDPGTLLHWLGDSSTEV

SEQ ID NO: 36792 - protein, 590 aa, Homo sapiens
  REGION 1..590: note = ENSP00000409471
MAPSGLKAVVGEKILSGVIRSVKKDGEWKVLIMDHPSMRILSSCCKMSDILAEGITIVEDINKRREPIPSLEAIYLLSPTEKALIKDFQGTPTFTYKAAHIFFTDTCPEPLFSELGRSRLAKVVKTLKEIHLAFLPYEAQVFSLDAPHSTYNLYCPFRAEERTRQLEVLAQQIATLCATLQEYPAIRYRKGPEDTAQLAHAVLAKLNAFKADTPSLGEGPEKTRSQLLIMDRAADPVSPLLHELTFQAMAYDLLDIEQDTYRYETTGLSEAREKAVLLDEDDDLWVELRHMHIADVSKKVTELLRTFCESKRLTTDKANIKDLSQILKKMPQYQKELNKYSTHLHLADDCMKHFKGSVEKLCSVEQDLAMGSDAEGEKIKDSMKLIVPVLLDAAVPAYDKIRVLLLYILLRNGVSEENLAKLIQHANVQAHSSLIRNLEQLGGTVTNPGGSGTSSRLEPRERMEPTYQLSRWTPVIKDVMEDAVEDRLDRNLWPFVSDPAPTASSQAAVSARFGHWHKNKAGIEARAGPRLIVYVMGGVAMSEMRAAYEVTRATEGKWEVLIGSSHILTPTRFLDDLKALDKKLEDIALP

SEQ ID NO: 36793 - protein, 171 aa, Homo sapiens
  REGION 1..171: note = ENSP00000471585
GVIRSVKKDGEWKVLIMDHPSMRILSSCCKMSDILAEGITIVEDINKRREPIPSLEAIYLLSPTEKSVQALIKDFQGTPTFTYKAAHIFFTDTCPEPLFSELGRSRLAKVVKTLKEIHLAFLPYEAQGPRGHSPVGPRRPGQAERLQGRHSQSGRGPRENPLPAADNGPGS

SEQ ID NO: 36794 - protein, 220 aa, Homo sapiens
  REGION 1..220: note = ENSP00000471737
  VARIANT 1: note = Any amino acid
XLRTFCESKRLTTDKANIKDLSQILKKMPQYQKELNKYSTHLHLADDCMKHFKGSVEKLCSVEQDLAMGSDAEGEKIKDSMKLIVPVLLDAAVPAYDKIRVLLLYILLRNGVSEENLAKLIQHANVQAHSSLIRNLEQLGGTVTNPGGSGTSSRLEPRERMEPTYQLSRWTPVIKDVMEDAVEDRLDRNLWPFVSDPAPTASSQAAVRLLTHPHPDPLPG

SEQ ID NO: 36795 - protein, 149 aa, Homo sapiens
  REGION 1..149: note = ENSP00000473040
  VARIANT 1: note = Any amino acid
XSVEKLCSVEQDLAMGSDAEGEKIKDSMKLIVPVLLDAAVPAYDKIRVLLLYILLRNGVSEENLAKLIQHANVQAHSSLIRNLEQLGGTVTNPGPHQAQPLCDQPPSPQSPCCPPCPACRARGPPAGWSRENAWSPPISCPAGPRSSRM

SEQ ID NO: 36796 - protein, 128 aa, Homo sapiens
  REGION 1..128: note = ENSP00000473406
MEPTYQLSRWTPVIKDVMEDAVEDRLDRNLWPFVSDPAPTASSQAAVSARFGHWHKNKAGIEARAGPRLIVYVMGGVAMSEMRAAYEVTRATEGKWEVLIGSSHILTPTRFLDDLKALDKKLEDIALP

SEQ ID NO: 36797 - protein, 395 aa, Homo sapiens [sequence omitted]

SEQ ID NO: 36798 - protein, 592 aa, Homo sapiens
  REGION 1..592: note = ENSP00000359025
MAPPVAERGLKSVVWQKIKATVFDDCKKEGEWKIMLLDEFTTKLLASCCKMTDLLEEGITVVENIYKNREPVRQMKALYFITPTSKSVDCFLHDFASKSENKYKAAYIYFTDFCPDNLFNKIKASCSKSIRRCKEINISFIPHESQVYTLDVPDAFYYCYSPDPGNAKGKDAIMETMADQIVTVCATLDENPGVRYKSKPLDNASKLAQLVEKKLEDYYKIDEKSLIKGKTHSQLLIIDRGFDPVSTVLHELTFQAMAYDLLPIENDTYKYKTDGKEKEAILEEEDDLWVRIRHRHIAVVLEEIPKLMKEISSTKKATEGKTSLSALTQLMKKMPHFRKQITKQVVHLNLAEDCMNKFKLNIEKLCKTEQDLALGTDAEGQKVKDSMRVLLPVLLNKNHDNCDKIRAILLYIFSINGTTEENLDRLIQNVKIENESDMIRNWSYLGVPIVPQSQQGKPLRKDRSAEETFQLSRWTPFIKDIMEDAIDNRLDSKEWPYCSQCPAVWNGSGAVSARQKPRANYLEDRKNGSKLIVFVIGGITYSEVRCAYEVSQAHKSCEVIIGSTHVLTPKKLLDDIKMLNKPKDKVSLIKDE

SEQ ID NO: 36799 - protein, 870 aa, Homo sapiens
  REGION 1..870: note = ENSP00000353007
MGPPSLVLCLLSATVFSLLGGSSAFLSHHRLKGRFQRDRRNIRPNIILVLTDDQDVELGSMQVMNKTRRIMEQGGAHFINAFVTTPMCCPSRSSILTGKYVHNHNTYTNNENCSSPSWQAQHESRTFAVYLNSTGYRTAFFGKYLNEYNGSYVPPGWKEWVGLLKNSRFYNYTLCRNGVKEKHGSDYSKDYLTDLITNDSVSFFRTSKKMYPHRPVLMVISHAAPHGPEDSAPQYSRLFPNASQHITPSYNYAPNPDKHWIMRYTGPMKPIHMEFTNMLQRKRLQTLMSVDDSMETIYNMLVETGELDNTYIVYTADHGYHIGQFGLVKGKSMPYEFDIRVPFYVRGPNVEAGCLNPHIVLNIDLAPTILDIAGLDIPADMDGKSILKLLDTERPVNRFHLKKKMRVWRDSFLVERGKLLHKRDNDKVDAQEENFLPKYQRVKDLCQRAEYQTACEQLGQKWQCVEDATGKLKLHKCKGPMRLGGSRALSNLVPKYYGQGSEACTCDSGDYKLSLAGRRKKLFKKKYKASYVRSRSIRSVAIEVDGRVYHVGLGDAAQPRNLTKRHWPGAPEDQDDKDGGDFSGTGGLPDYSAANPIKVTHRCYILENDTVQCDLDLYKSLQAWKDHKLHIDHEIETLQNKIKNLREVRGHLKKKRPEECDCHKISYHTQHKGRLKHRGSSLHPFRKGLQEKDKVWLLREQKRKKKLRKLLKRLQNNDTCSMPGLTCFTHDNQHWQTAPFWTLGPFCACTSANNNTYWCMRTINETHNFLFCEFATGFLEYFDLNTDPYQLMNAVNTLDRDVLNQLHVQLMELRSCKGYKQCNPRTRNMDLGLKDGGSYEQYRQFQRRKWPEMKRPSSKSLGQLWEGWEG

SEQ ID NO: 36800 - protein, 870 aa, Homo sapiens; identical to SEQ ID NO: 36799
  REGION 1..870: note = ENSP00000418290

SEQ ID NO: 36801 - protein, 207 aa, Homo sapiens
  REGION 1..207: note = ENSP00000417894
  VARIANT 1: note = Any amino acid
XEVRGHLKKKRPEECDCHKISYHTQHKGRLKHRGSSLHPFRKGLQEKDKVWLLREQKRKKKLRKLLKRLQNNDTCSMPGLTCFTHDNQHWQTAPFWTLGPFCACTSANNNTYWCMRTINETHNFLFCEFATGFLEYFDLNTDPYQLMNAVNTLDRDVLNQLHVQLMELRSCKGYKQCNPRTRNMDLGLKDGGSYEQYRGQLWEGWEG

SEQ ID NO: 36802 - protein, 867 aa, Homo sapiens
  REGION 1..867: note = ENSP00000418442
MGPPSLVLCLLSATVFSLLGGSSAFLSHHRLKGRFQRDRRNIRPNIILVLTDDQDVELGSMQVMNKTRRIMEQGGAHFINAFVTTPMCCPSRSSILTGKYVHNHNTYTNNENCSSPSWQAQHESRTFAVYLNSTGYRTAFFGKYLNEYNGSYVPPGWKEWVGLLKNSRFYNYTLCRNGVKEKHGSDYSKDYLTDLITNDSVSFFRTSKKMYPHRPVLMVISHAAPHGPEDSAPQYSRLFPNASQHITPSYNYAPNPDKHWIMRYTGPMKPIHMEFTNMLQRKRLQTLMSVDDSMETIYNMLVETGELDNTYIVYTADHGYHIGQFGLVKGKSMPYEFDIRVPFYVRGPNVEAGCLNPHIVLNIDLAPTILDIAGLDIPADMDGKSILKLLDTERPVNRFHLKKKMRVWRDSFLVERGKLLHKRDNDKVDAQEENFLPKYQRVKDLCQRAEYQTACEQLGQKWQCVEDATGKLKLHKCKGPMRLGGSRALSNLVPKYYGQGSEACTCDSGDYKLSLAGRRKKLFKKKYKASYVRSRSIRSVAIEVDGRVYHVGLGDAAQPRNLTKRHWPGAPEDQDDKDGGDFSGTGGLPDYSAANPIKVTHRCYILENDTVQCDLDLYKSLQAWKDHKLHIDHEIETLQNKIKNLREVRGHLKKKRPEECDCHKISYHTQHKGRLKHRGSSLHPFRKGLQEKDKVWLLREQKRKKKLRKLLKRLQNNDTCSMPGLTCFTHDNQHWQTAPFWTLGPFCACTSANNNTYWCMRTINETHNFLFCEFATGFLEYFDLNTDPYQLMNAVNTLDRDVLNQLHVQLMELRSCKGYKQCNPRTRNMDLDGGSYEQYRQFQRRKWPEMKRPSSKSLGQLWEGWEG

SEQ ID NO: 36803 - protein, 189 aa, Homo sapiens
  REGION 1..189: note = ENSP00000410026
MGPPSLVLCLLSATVFSLLGGSSAFLSHHRLKGRFQRDRRNIRPNIILVLTDDQDVELGSMQVMNKTRRIMEQGGAHFINAFVTTPMCCPSRSSILTGKYVHNHNTYTNNENCSSPSWQAQHESRTFAVYLNSTGYRTAFFGKYLNEYNGSYVPPGWKEWVGLLKNSRFYNYTLCRNGVKEKHGSDYSK

SEQ ID NO: 36804 - protein, 256 aa, Homo sapiens
  REGION 1..256: note = ENSP00000361032
MSELPGDVRAFLREHPSLRLQTDARKVRCILTGHELPCRLPELQVYTRGKKYQRLVRASPAFDYAEFEPHIVPSTKNPHQLFCKLTLRHINKCPEHVLRHTQGRRYQRALCKYEECQKQGVEYVPACLVHRRRRREDQMDGDGPRPREAFWEPTSSDEGGAASDDSMTDLYPPELFTRKDLGSTEDGDGTDDFLTDKEDEKAKPPREKATDEGRRETTVYRGLVQKRGKKQLGSLKKKFKSHHRKPKSFSSCKQPG

SEQ ID NO: 36805 - protein, 256 aa, Homo sapiens; identical to SEQ ID NO: 36804
  REGION 1..256: note = ENSP00000487370

SEQ ID NO: 36806 - protein, 629 aa, Homo sapiens
  REGION 1..629: note = ENSP00000308727
MTAEGPSPPARWHRRLPGLWAAALLLLGLPRLSVRADGKFFVLESQNGSQGLQLEAARLSCKSRGAHLASADELRRVVQDCSFAVCTTGWLADGTLGTTVCSKGSGEQQIMRAVDVRIESNPVPGGTYSALCIKDEEKPCGDPPSFPHTILQGRTGLEMGDELLYVCAPGHIMGHRETAFTLLCNSCGEWYGLVQACGKDEAEAHIDYEDNFPDDRSVSFRELMEDSRTEADEDRGQGDSSEEAPKQDRLVSISVGRENIARDKVFVPTTGLPGAGSSVPADSPGSRLLQKHLFWFPAEAFHKPGLEKEVDDDTKKQFSAGDNHSGVKLVPGEPETKVIYGNTDGPSGPFVGKNDSKAGDPVVSSSDESWLDGYPVTEGAWRKTEAEEEEDGDRGDGSVGLDENVLVTPDQPILVEVKKPKSSTLTPSEGMTHSSVLPSQMLDVEALALRPVNASETEGIGDGDLTKYQSTLPWRFITEESPMATLSYELTSSTLEILTVNTVKQTPNHIPSTIMATTQPPVETTVPEIQDSFPYLLSEDFFGQEGPGPGASEELHPTLESCVGDGCPGLSRGPVIATIVTVLCLLLLLAGVGMVWGYRKCQHKSSVYKLNVGQRQARHYHQQIEMEKV

SEQ ID NO: 36807 - protein, 243 aa, Homo sapiens
  REGION 1..243: note = ENSP00000406475
  VARIANT 1: note = Any amino acid
XAEGPSPPARWHRRLPGLWAAALLLLGLPRLSVRADGKFFVLESQNGSQGLQLEAARLSCKSRGAHLASADELRRVVQDCSFAVCTTGWLADGTLGTTVCSKGSGEQQIMRAVDVRIESNPVPGGTYSALCIKDEDEAEAHIDYEDNFPDDRSVSFRELMEDSRTEADEDRGQGDSSEEAPKQDRLVSISVGRENIARDKVFVPTTGLPGAGSSVPADSPGSRLLQKHLFWFPAEAFHKPGLE

SEQ ID NO: 36808 - protein, 303 aa, Homo sapiens
  REGION 1..303: note = ENSP00000344424
MCHGRIAPKSTSVFAVASVGHGVFLPLVILCTLLGDGLASVCPLPPEPENGGYICHPRPCRDPLTAGSVIEYLCAEGYMLKGDYKYLTCKNGEWKPAMEISCRLNEDKDTHTSLGVPTLSIVASTASSVALILLLVVLFVLLQPKLKSFHHSRRDQGVSGDQVSIMVDGVQVALPSYEEAVYGSSGHCVPPADPRVQIVLSEGSGPSGRSVPREQQLPDQGACSSAGGEDEAPGQSGLCEAWGSRASETVMVHQATTSSWVAGSGNRQLAHKETADSENSDIQSLLSLTSEEYTDDIPLLKEA

SEQ ID NO: 36809 - protein, 532 aa, Homo sapiens
  REGION 1..532: note = ENSP00000443243
MIVYLGMMAGAFILGGLADKLGRKRVLSMSLAVNASFASLSSFVQGYGAFLFCRLISGIGIGGALPIVFAYFSEFLSREKRGEHLSWLGIFWMTGGLYASAMAWSIIPHYGWGFSMGTNYHFHSWRVFVIVCALPCTVSMVALKFMPESPRFLLEMGKHDEAWMILKQVHDTNMRAKGTPEKVFTVSNIKTPKQMDEFIEIQSSTGTWYQRWLVRFKTIFKQVWDNALYCVMGPYRMNTLILAVVWFAMAFSYYGLTVWFPDMIRYFQDEEYKSKMKVFFGEHVYGATINFTMENQIHQHGKLVNDKFTRMYFKHVLFEDTFFDECYFEDVTSTDTYFKNCTIESTIFYNTDLYEHKFINCRFINSTFLEQKEGCHMDLEQDNDFLIYLVSFLGSLSVLPGNIISALLMDRIGRLKMIGGSMLISAVCCFFLFFGNSESAMIGWQCLFCGTSIAAWNALDVITVELYPTNQRATAFGILNGLCKFGAILGNTIFASFVGITKVVPILLAAASLVGGGLIALRLPETREQVLM

SEQ ID NO: 36810 - protein, 683 aa, Homo sapiens
  REGION 1..683: note = ENSP00000377779
MDDYKYQDNYGGYAPSDGYYRGNESNPEEDAQSDVTEGHDEEDEIYEGEYQGIPHPDDVKAKQAKMAPSRMDSLRGQTDLMAERLEDEEQLAHQYETIMDECGHGRFQWILFFVLGLALMADGVEVFVVSFALPSAEKDMCLSSSKKGMLGMIVYLGMMAGAFILGGLADKLGRKRVLSMSLAVNASFASLSSFVQGYGAFLFCRLISGIGIGGALPIVFAYFSEFLSREKRGEHLSWLGIFWMTGGLYASAMAWSIIPHYGWGFSMGTNYHFHSWRVFVIVCALPCTVSMVALKFMPESPRFLLEMGKHDEAWMILKQVHDTNMRAKGTPEKVFTVSNIKTPKQMDEFIEIQSSTGTWYQRWLVRFKTIFKQVWDNALYCVMGPYRMNTLILAVVWFAMAFSYYGLTVWFPDMIRYFQDEEYKSKMKVFFGEHVYGATINFTMENQIHQHGKLVNDKFTRMYFKHVLFEDTFFDECYFEDVTSTDTYFKNCTIESTIFYNTDLYEHKFINCRFINSTFLEQKEGCHMDLEQDNDFLIYLVSFLGSLSVLPGNIISALLMDRIGRLKMIGGSMLISAVCCFFLFFGNSESAMIGWQCLFCGTSIAAWNALDVITVELYPTNQRATAFGILNGLCKFGAILGNTIFASFVGITKVVPILLAAASLVGGGLIALRLPETREQVLM

SEQ ID NO: 36811 - protein, 683 aa, Homo sapiens; identical to SEQ ID NO: 36810
  REGION 1..683: note = ENSP00000450992

SEQ ID NO: 36812 - protein, 683 aa, Homo sapiens; identical to SEQ ID NO: 36810
  REGION 1..683: note = ENSP00000332818

SEQ ID NO: 36813 - protein, 727 aa, Homo sapiens
  REGION 1..727: note = ENSP00000423541
MEDSYKDRTSLMKGAKDIAREVKKQTVKKVNQAVDRAQDEYTQRSYSRFQDEEDDDDYYPAGETYNGEANDDEGSSEATEGHDEDDEIYEGEYQGIPSMNQAKDSIVSVGQPKGDEYKDRRELESERRADEEELAQQYELIIQECGHGRFQWALFFVLGMALMADGVEVFVVGFVLPSAETDLCIPNSGSGWLGSIVYLGMMVGAFFWGGLADKVGRKQSLLICMSVNGFFAFLSSFVQGYGFFLFCRLLSGFGIGGAIPTVFSYFAEVLAREKRGEHLSWLCMFWMIGGIYASAMAWAIIPHYGWSFSMGSAYQFHSWRVFVIVCALPCVSSVVALTFMPESPRFLLEVGKHDEAWMILKLIHDTNMRARGQPEKVFTVNKIKTPKQIDELIEIESDTGTWYRRCFVRIRTELYGIWLTFMRCFNYPVRDNTIKLTIVWFTLSFGYYGLSVWFPDVIKPLQSDEYALLTRNVERDKYANFTINFTMENQIHTGMEYDNGRFIGVKFKSVTFKDSVFKSCTFEDVTSVNTYFKNCTFIDTVFDNTDFEPYKFIDSEFKNCSFFHNKTGCQITFDDDYSAYWIYFVNFLGTLAVLPGNIVSALLMDRIGRLTMLGGSMVLSGISCFFLWFGTSESMMIGMLCLYNGLTISAWNSLDVVTVELYPTDRRATGFGFLNALCKAAAVLGNLIFGSLVSITKSIPILLASTVLVCGGLVGLCLPDTRTQVLM

SEQ ID NO: 36814 - protein, 676 aa, Homo sapiens
  REGION 1..676: note = ENSP00000316983
MEDSYKDRTSLMKGAKDIAREVKKQTVKKVNQAVDRAQDEYTQRSYSRFQDEEDDDDYYPAGETYNGEANDDEGSSEATEGHDEDDEIYEGEYQGIPSMNQAKDSIVSVGQPKGDEYKDRRELESERRADEEELAQQYELIIQECGHGRFQWALFFVLGMALMADGVEVFVVGFVLPSAETDLCIPNSGSGWLGSIVYLGMMVGAFFWGGLADKVGRKQSLLICMSVNGFFAFLSSFVQGYGFFLFCRLLSGFGIGGAIPTVFSYFAEVLAREKRGEHLSWLCMFWMIGGIYASAMAWAIIPHYGWSFSMGSAYQFHSWRVFVIVCALPCVSSVVALTFMPESPRFLLEVGKHDEAWMILKLIHDTNMRARGQPEKVFTVNKIKTPKQIDELIEIESDTGTWYRRCFVRIRTELYGIWLTFMRCFNYPVRDNTIKLTIVWFTLSFGYYGLSVWFPDVIKPLQSDEYALLTRNVERDKYANFTINFTMENQIHTGMEYDNGRFIGVKFKSVTFKDSVFKSCTFEDVTSVNTYFKNCTFIDTVFDNTDFEPYKFIDSEFKNCSFFHNKTGCQITFDDDYSAYWIYFVNFLGTLAVLPGNIVSALLMDRIGRLTMLGGSMVLSGISCFFLWFGTSESMMIGMLCLYNGLTISAWNSLDVVTVELYPTDRRRRVLPCCPG

SEQ ID NO: 36815 - protein, 3571 aa, Homo sapiens
  REGION 1..3571: note = ENSP00000363593
MWPRLAFCCWGLALVSGWATFQQMSPSRNFSFRLFPETAPGAPGSIPAPPAPGDEAAGSRVERLGQAFRRRVRLLRELSERLELVFLVDDSSSVGEVNFRSELMFVRKLLSDFPVVPTATRVAIVTFSSKNYVVPRVDYISTRRARQHKCALLLQEIPAISYRGGGTYTKGAFQQAAQILLHARENSTKVVFLITDGYSNGGDPRPIAASLRDSGVEIFTFGIWQGNIRELNDMASTPKEEHCYLLHSFEEFEALARRALHEDLPSGSFIQDDMVHCSYLCDEGKDCCDRMGSCKCGTHTGHFECICEKGYYGKGLQYECTACPSGTYKPEGSPGGISSCIPCPDENHTSPPGSTSPEDCVCREGYRASGQTCELVHCPALKPPENGYFIQNTCNNHFNAACGVRCHPGFDLVGSSIILCLPNGLWSGSESYCRVRTCPHLRQPKHGHISCSTREMLYKTTCLVACDEGYRLEGSDKLTCQGNSQWDGPEPRCVERHCSTFQMPKDVIISPHNCGKQPAKFGTICYVSCRQGFILSGVKEMLRCTTSGKWNVGVQAAVCKDVEAPQINCPKDIEAKTLEQQDSANVTWQIPTAKDNSGEKVSVHVHPAFTPPYLFPIGDVAIVYTATDLSGNQASCIFHIKVIDAEPPVIDWCRSPPPVQVSEKVHAASWDEPQFSDNSGAELVITRSHTQGDLFPQGETIVQYTATDPSGNNRTCDIHIVIKGSPCEIPFTPVNGDFICTPDNTGVNCTLTCLEGYDFTEGSTDKYYCAYEDGVWKPTYTTEWPDCAKKRFANHGFKSFEMFYKAARCDDTDLMKKFSEAFETTLGKMVPSFCSDAEDIDCRLEENLTKKYCLEYNYDYENGFAIGPGGWGAANRLDYSYDDFLDTVQETATSIGNAKSSRIKRSAPLSDYKIKLIFNITASVPLPDERNDTLEWENQQRLLQTLETITNKLKRTLNKDPMYSFQLASEILIADSNSLETKKASPFCRPGSVLRGRMCVNCPLGTYYNLEHFTCESCRIGSYQDEEGQLECKLCPSGMYTEYIHSRNISDCKAQCKQGTYSYSGLETCESCPLGTYQPKFGSRSCLSCPENTSTVKRGAVNISACGVPCPEGKFSRSGLMPCHPCPRDYYQPNAGKAFCLACPFYGTTPFAGSRSITECSSFSSTFSAAEESVVPPASLGHIKKRHEISSQVFHECFFNPCHNSGTCQQLGRGYVCLCPLGYTGLKCETDIDECSPLPCLNNGVCKDLVGEFICECPSGYTGQRCEENINECSSSPCLNKGICVDGVAGYRCTCVKGFVGLHCETEVNECQSNPCLNNAVCEDQVGGFLCKCPPGFLGTRCGKNVDECLSQPCKNGATCKDGANSFRCLCAAGFTGSHCELNINECQSNPCRNQATCVDELNSYSCKCQPGFSGKRCETEQSTGFNLDFEVSGIYGYVMLDGMLPSLHALTCTFWMKSSDDMNYGTPISYAVDNGSDNTLLLTDYNGWVLYVNGREKITNCPSVNDGRWHHIAITWTSANGIWKVYIDGKLSDGGAGLSVGLPIPGGGALVLGQEQDKKGEGFSPAESFVGSISQLNLWDYVLSPQQVKSLATSCPEELSKGNVLAWPDFLSGIVGKVKIDSKSIFCSDCPRLGGSVPHLRTASEDLKPGSKVNLFCDPGFQLVGNPVQYCLNQGQWTQPLPHCERISCGVPPPLENGFHSADDFYAGSTVTYQCNNGYYLLGDSRMFCTDNGSWNGVSPSCLDVDECAVGSDCSEHASCLNVDGSYICSCVPPYTGDGKNCAEPIKCKAPGNPENGHSSGEIYTVGAEVTFSCQEGYQLMGVTKITCLESGEWNHLIPYCKAVSCGKPAIPENGCIEELAFTFGSKVTYRCNKGYTLAGDKESSCLANSSWSHSPPVCEPVKCSSPENINNGKYILSGLTYLSTASYSCDTGYSLQGPSIIECTASGIWDRAPPACHLVFCGEPPAIKDAVITGNNFTFRNTVTYTCKEGYTLAGLDTIECLADGKWSRSDQQCLAVSCDEPPIVDHASPETAHRLFGDIAFYYCSDGYSLADNSQLLCNAQGKWVPPEGQDMPRCIAHFCEKPPSVSYSILESVSKAKFAAGSVVSFKCMEGFVLNTSAKIECMRGGQWNPSPMSIQCIPVRCGEPPSIMNGYASGSNYSFGAMVAYSCNKGFYIKGEKKSTCEATGQWSSPIPTCHPVSCGEPPKVENGFLEHTTGRIFESEVRYQCNPGYKSVGSPVFVCQANRHWHSESPLMCVPLDCGKPPPIQNGFMKGENFEVGSKVQFFCNEGYELVGDSSWTCQKSGKWNKKSNPKCMPAKCPEPPLLENQLVLKELTTEVGVVTFSCKEGHVLQGPSVLKCLPSQQWNDSFPVCKIVLCTPPPLISFGVPIPSSALHFGSTVKYSCVGGFFLRGNSTTLCQPDGTWSSPLPECVPVECPQPEEIPNGIIDVQGLAYLSTALYTCKPGFELVGNTTTLCGENGHWLGGKPTCKAIECLKPKEILNGKFSYTDLHYGQTVTYSCNRGFRLEGPSALTCLETGDWDVDAPSCNAIHCDSPQPIENGFVEGADYSYGAIIIYSCFPGFQVAGHAMQTCEESGWSSSIPTCMPIDCGLPPHIDFGDCTKLKDDQGYFEQEDDMMEVPYVTPHPPYHLGAVAKTWENTKESPATHSSNFLYGTMVSYTCNPGYELLGNPVLICQEDGTWNGSAPSCISIECDLPTAPENGFLRFTETSMGSAVQYSCKPGHILAGSDLRLCLENRKWSGASPRCEAISCKKPNPVMNGSIKGSNYTYLSTLYYECDPGYVLNGTERRTCQDDKNWDEDEPICIPVDCSSPPVSANGQVRGDEYTFQKEIEYTCNEGFLLEGARSRVCLANGSWSGATPDCVPVRCATPPQLANGVTEGLDYGFMKEVTFHCHEGYILHGAPKLTCQSDGNWDAEIPLCKPVNCGPPEDLAHGFPNGFSFIHGGHIQYQCFPGYKLHGNSSRRCLSNGSWSGSSPSCLPCRCSTPVIEYGTVNGTDFDCGKAARIQCFKGFKLLGLSEITCEADGQWSSGFPHCEHTSCGSLPMIPNAFISETSSWKENVITYSCRSGYVIQGSSDLICTEKGVWSQPYPVCEPLSCGSPPSVANAVATGEAHTYESEVKLRCLEGYTMDTDTDTFTCQKDGRWFPERISCSPKKCPLPENITHILVHGDDFSVNRQVSVSCAEGYTFEGVNISVCQLDGTWEPPFSDESCSPVSCGKPESPEHGFVVGSKYTFESTIIYQCEPGYELEGNRERVCQENRQWSGGVAICKETRCETPLEFLNGKADIENRTTGPNVVYSCNRGYSLEGPSEAHCTENGTWSHPVPLCKPNPCPVPFVIPENALLSEKEFYVDQNVSIKCREGFLLQGHGIITCNPDETWTQTSAKCEKISCGPPAHVENAIARGVHYQYGDMITYSCYSGYMLEGFLRSVCLENGTWTSPPICRAVCRFPCQNGGICQRPNACSCPEGWMGRLCEEPICILPCLNGGRCVAPYQCDCPPGWTGSRCHTAVCQSPCLNGGKCVRPNRCHCLSSWTGHNCSRKRRTGF

SEQ ID NO: 36816 - protein, 868 aa, Homo sapiens
  REGION 1..868: note = ENSP00000363585
MWPRLAFCCWGLALVSGWATFQQMSPSRNFSFRLFPETAPGAPGSIPAPPAPGDEAAGSRVERLGQAFRRRVRLLRELSERLELVFLVDDSSSVGEVNFRSELMFVRKLLSDFPVVPTATRVAIVTFSSKNYVVPRVDYISTRRARQHKCALLLQEIPAISYRGGGTYTKGAFQQAAQILLHARENSTKVVFLITDGYSNGGDPRPIAASLRDSGVEIFTFGIWQGNIRELNDMASTPKEEHCYLLHSFEEFEALARRALHEDLPSGSFIQDDMVHCSYLCDEGKDCCDRMGSCKCGTHTGHFECICEKGYYGKGLQYECTACPSGTYKPEGSPGGISSCIPCPDENHTSPPGSTSPEDCVCREGYRASGQTCELVHCPALKPPENGYFIQNTCNNHFNAACGVRCHPGFDLVGSSIILCLPNGLWSGSESYCRVRTCPHLRQPKHGHISCSTREMLYKTTCLVACDEGYRLEGSDKLTCQGNSQWDGPEPRCVERHCSTFQMPKDVIISPHNCGKQPAKFGTICYVSCRQGFILSGVKEMLRCTTSGKWNVGVQAAVCKDVEAPQINCPKDIEAKTLEQQDSANVTWQIPTAKDNSGEKVSVHVHPAFTPPYLFPIGDVAIVYTATDLSGNQASCIFHIKVIDAEPPVIDWCRSPPPVQVSEKVHAASWDEPQFSDNSGAELVITRSHTQGDLFPQGETIVQYTATDPSGNNRTCDIHIVIKGSPCEIPFTPVNGDFICTPDNTGVNCTLTCLEGYDFTEGSTDKYYCAYEDGVWKPTYTTEWPDCAKKRFANHGFKSFEMFYKAARCDDTDLMKKFSEAFETTLGKMVPSFCSDAEDIDCRLEENLTKKYCLEYNYDYENGFAIGN

SEQ ID NO: 36817 - protein, 3574 aa, Homo sapiens
  REGION 1..3574: note = ENSP00000384917
MWPRLAFCCWGLALVSGWATFQQMSPSRNFSFRLFPETAPGAPGSIPAPPAPGDEAAGSRVERLGQAFRRRVRLLRELSERLELVFLVDDSSSVGEVNFRSELMFVRKLLSDFPVVPTATRVAIVTFSSKNYVVPRVDYISTRRARQHKCALLLQEIPAISYRGGGTYTKGAFQQAAQILLHARENSTKVVFLITDGYSNGGDPRPIAASLRDSGVEIFTFGIWQGNIRELNDMASTPKEEHCYLLHSFEEFEALARRALHEDLPSGSFIQDDMVHCSYLCDEGKDCCDRMGSCKCGTHTGHFECICEKGYYGKGLQYECTACPSGTYKPEGSPGGISSCIPCPDENHTSPPGSTSPEDCVCREGYRASGQTCELVHCPALKPPENGYFIQNTCNNHFNAACGVRCHPGFDLVGSSIILCLPNGLWSGSESYCRVRTCPHLRQPKHGHISCSTREMLYKTTCLVACDEGYRLEGSDKLTCQGNSQWDGPEPRCVERHCSTFQMPKDVIISPHNCGKQPAKFGTICYVSCRQGFILSGVKEMLRCTTSGKWNVGVQAAVCKDVEAPQINCPKDIEAKTLEQQDSANVTWQIPTAKDNSGEKVSVHVHPAFTPPYLFPIGDVAIVYTATDLSGNQASCIFHIKVIDAEPPVIDWCRSPPPVQVSEKVHAASWDEPQFSDNSGAELVITRSHTQGDLFPQGETIVQYTATDPSGNNRTCDIHIVIKGSPCEIPFTPVNGDFICTPDNTGVNCTLTCLEGYDFTEGSTDKYYCAYEDGVWKPTYTTEWPDCAKKRFANHGFKSFEMFYKAARCDDTDLMKKFSEAFETTLGKMVPSFCSDAEDIDCRLEENLTKKYCLEYNYDYENGFAIGPGGWGAANRLDYSYDDFLDTVQETATSIGNAKSSRIKRSAPLSDYKIKLIFNITASVPLPDERNDTLEWENQQRLLQTLETITNKLKRTLNKDPMYSFQLASEILIADSNSLETKKASPFCRPGSVLRGRMCVNCPLGTYYNLEHFTCESCRIGSYQDEEGQLECKLCPSGMYTEYIHSRNISDCKAQCKQGTYSYSGLETCESCPLGTYQPKFGSRSCLSCPENTSTVKRGAVNISACGVPCPEGKFSRSGLMPCHPCPRDYYQPNAGKAFCLACPFYGTTPFAGSRSITECSSFSSTFSAAEESVVPPASLGHIKKRHEISSQVFHECFFNPCHNSGTCQQLGRGYVCLCPLGYTGLKCETDIDECSPLPCLNNGVCKDLVGEFICECPSGYTGQRCEENINECSSSPCLNKGICVDGVAGYRCTCVKGFVGLHCETEVNECQSNPCLNNAVCEDQVGGFLCKCPPGFLGTRCGKNVDECLSQPCKNGATCKDGANSFRCLCAAGFTGSHCELNINECQSNPCRNQATCVDELNSYSCKCQPGFSGKRCETEQSTGFNLDFEVSGIYGYVMLDGMLPSLHALTCTFWMKSSDDMNYGTPISYAVDNGSDNTLLLTDYNGWVLYVNGREKITNCPSVNDGRWHHIAITWTSANGIWKVYIDGKLSDGGAGLSVGLPIPGMLGGGALVLGQEQDKKGEGFSPAESFVGSISQLNLWDYVLSPQQVKSLATSCPEELSKGNVLAWPDFLSGIVGKVKIDSKSIFCSDCPRLGGSVPHLRTASEDLKPGSKVNLFCDPGFQLVGNPVQYCLNQGQWTQPLPHCERISCGVPPPLENGFHSADDFYAGSTVTYQCNNGYYLLGDSRMFCTDNGSWNGVSPSCLDVDECAVGSDCSEHASCLNVDGSYICSCVPPYTGDGKNCAEPIKCKAPGNPENGHSSGEIYTVGAEVTFSCQEGYQLMGVTKITCLESGEWNHLIPYCKAVSCGKPAIPENGCIEELAFTFGSKVTYRCNKGYTLAGDKESSCLANSSWSHSPPVCEPVKCSSPENINNGKYILSGLTYLSTASYSCDTGYSLQGPSIIECTASGIWDRAPPACHLVFCGEPPAIKDAVITGNNFTFRNTVTYTCKEGYTLAGLDTIECLADGKWSRSDQQCLAVSCDEPPIVDHASPETAHRLFGDIAFYYCSDGYSLADNSQLLCNAQGKWVPPEGQDMPRCIAHFCEKPPSVSYSILESVSKAKFAAGSVVSFKCMEGFVLNTSAKIECMRGGQWNPSPMSIQCIPVRCGEPPSIMNGYASGSNYSFGAMVAYSCNKGFYIKGEKKSTCEATGQWSSPIPTCHPVSCGEPPKVENGFLEHTTGRIFESEVRYQCNPGYKSVGSPVFVCQANRHWHSESPLMCVPLDCGKPPPIQNGFMKGENFEVGSKVQFFCNEGYELVGDSSWTCQKSGKWNKKSNPKCMPAKCPEPPLLENQLVLKELTTEVGVVTFSCKEGHVLQGPSVLKCLPSQQWNDSFPVCKIVLCTPPPLISFGVPIPSSALHFGSTVKYSCVGGFFLRGNSTTLCQPDGTWSSPLPECVPVECPQPEEIPNGIIDVQGLAYLSTALYTCKPGFELVGNTTTLCGENGHWLGGKPTCKAIECLKPKEILNGKFSYTDLHYGQTVTYSCNRGFRLEGPSALTCLETGDWDVDAPSCNAIHCDSPQPIENGFVEGADYSYGAIIIYSCFPGFQVAGHAMQTCEESGWSSSIPTCMPIDCGLPPHIDFGDCTKLKDDQGYFEQEDDMMEVPYVTPHPPYHLGAVAKTWENTKESPATHSSNFLYGTMVSYTCNPGYELLGNPVLICQEDGTWNGSAPSCISIECDLPTAPENGFLRFTETSMGSAVQYSCKPGHILAGSDLRLCLENRKWSGASPRCEAISCKKPNPVMNGSIKGSNYTYLSTLYYECDPGYVLNGTERRTCQDDKNWDEDEPICIPVDCSSPPVSANGQVRGDEYTFQKEIEYTCNEGFLLEGARSRVCLANGSWSGATPDCVPVRCATPPQLANGVTEGLDYGFMKEVTFHCHEGYILHGAPKLTCQSDGNWDAEIPLCKPVNCGPPEDLAHGFPNGFSFIHGGHIQYQCFPGYKLHGNSSRRCLSNGSWSGSSPSCLPCRCSTPVIEYGTVNGTDFDCGKAARIQCFKGFKLLGLSEITCEADGQWSSGFPHCEHTSCGSLPMIPNAFISETSSWKENVITYSCRSGYVIQGSSDLICTEKGVWSQPYPVCEPLSCGSPPSVANAVATGEAHTYESEVKLRCLEGYTMDTDTDTFTCQKDGRWFPERISCSPKKCPLPENITHILVHGDDFSVNRQVSVSCAEGYTFEGVNISVCQLDGTWEPPFSDESCSPVSCGKPESPEHGFVVGSKYTFESTIIYQCEPGYELEGNRERVCQENRQWSGGVAICKETRCETPLEFLNGKADIENRTTGPNVVYSCNRGYSLEGPSEAHCTENGTWSHPVPLCKPNPCPVPFVIPENALLSEKEFYVDQNVSIKCREGFLLQGHGIITCNPDETWTQTSAKCEKISCGPPAHVENAIARGVHYQYGDMITYSCYSGYMLEGFLRSVCLENGTWTSPPICRAVCRFPCQNGGICQRPNACSCPEGWMGRLCEEPICILPCLNGGRCVAPYQCDCPPGWTGSRCHTAVCQSPCLNGGKCVRPNRCHCLSSWTGHNCSRKRRTGF

SEQ ID NO: 36818 - protein, 1788 aa, Homo sapiens
  REGION 1..1788: note = ENSP00000364549
MKRKERIARRLEGIENDTQPILLQSCTGLVTHRLLEEDTPRYMRASDPASPHIGRSNEEEETSDSSLEKQTRSKYCTETSGVHGDSPYGSGTMDTHSLESKAERIARYKAERRRQLAEKYGLTLDPEADSEYLSRYTKSRKEPDAVEKRGGKSDKQEESSRDASSLYPGTETMGLRTCAGESKDYALHVGDGSSDPEVLLNIENQRRGQELSATRQAHDLSPAAESSSTFSFSGRDSSFTEVPRSPKHAHSSSLQQAASRSPSFGDPQLSPEARPRCTSHSETPTVDDEEKVDERAKLSVAAKRLLFREMEKSFDEQNVPKRRSRNTAVEQRLRRLQDRSLTQPITTEEVVIAATLQASAHQKALAKDQTNEGKELAEQGEPDSSTLSLAEKLALFNKLSQPVSKAISTRNRIDTRQRRMNARYQTQPVTLGEVEQVQSGKLIPFSPAVNTSVSTVASTVAPMYAGDLRTKPPLDHNASATDYKFSSSIENSDSPVRSILKSQAWQPLVEGSENKGMLREYGETESKRALTGRDSGMEKYGSFEEAEASYPILNRAREGDSHKESKYAVPRRGSLERANPPITHLGDEPKEFSMAKMNAQGNLDLRDRLPFEEKVEVENVMKRKFSLRAAEFGEPTSEQTGTAAGKTIAQTTAPVSWKPQDSSEQPQEKLCKNPCAMFAAGEIKTPTGEGLLDSPSKTMSIKERLALLKKSGEEDWRNRLSRRQEGGKAPASSLHTQEAGRSLIKKRVTESRESQMTIEERKQLITVREEAWKTRGRGAANDSTQFTVAGRMVKKGLASPTAITPVASPICGKTRGTTPVSKPLEDIEARPDMQLESDLKLDRLETFLRRLNNKVGGMHETVLTVTGKSVKEVMKPDDDETFAKFYRSVDYNMPRSPVEMDEDFDVIFDPYAPKLTSSVAEHKRAVRPKRRVQASKNPLKMLAAREDLLQEYTEQRLNVAFMESKRMKVEKMSSNSNFSEVTLAGLASKENFSNVSLRSVNLTEQNSNNSAVPYKRLMLLQIKGRRHVQTRLVEPRASALNSGDCFLLLSPHCCFLWVGEFANVIEKAKASELATLIQTKRELGCRATYIQTIEEGINTHTHAAKDFWKLLGGQTSYQSAGDPKEDELYEAAIIETNCIYRLMDDKLVPDDDYWGKIPKCSLLQPKEVLVFDFGSEVYVWHGKEVTLAQRKIAFQLAKHLWNGTFDYENCDINPLDPGECNPLIPRKGQGRPDWAIFGRLTEHNETILFKEKFLDWTELKRSNEKNPGELAQHKEDPRTDVKAYDVTRMVSMPQTTAGTILDGVNVGRGYGLVEGHDRRQFEITSVSVDVWHILEFDYSRLPKQSIGQFHEGDAYVVKWKFMVSTAVGSRQKGEHSVRAAGKEKCVYFFWQGRHSTVSEKGTSALMTVELDEERGAQVQVLQGKEPPCFLQCFQGGMVVHSGRREEEEENVQSEWRLYCVRGEVPVEGNLLEVACHCSSLRSRTSMVVLNVNKALIYLWHGCKAQAHTKEVGRTAANKIKEQCPLEAGLHSSSKVTIHECDEGSEPLGFWDALGRRDRKAYDCMLQDPGSFNFAPRLFILSSSSGDFAATEFVYPARAPSVVSSMPFLQEDLYSAPQPALFLVDNHHEVYLWQGWWPIENKITGSARIRWASDRKSAMETVLQYCKGKNLKKPAPKSYLIHAGLEPLTFTNMFPSWEHREDIAEITEMDTEVSNQITLVEDVLAKLCKTIYPLADLLARPLPEGVDPLKLEIYLTDEDFEFALDMTRDEYNALPAWKQVNLKKAKGLF

SEQ ID NO: 36819 - protein, 2214 aa, Homo sapiens
  REGION 1..2214: note = ENSP00000348128
MKRKERIARRLEGIENDTQPILLQSCTGLVTHRLLEEDTPRYMRASDPASPHIGRSNEEEETSDSSLEKQTRSKYCTETSGVHGDSPYGSGTMDTHSLESKAERIARYKAERRRQLAEKYGLTLDPEADSEYLSRYTKSRKEPDAVEKRGGKSDKQEESSRDASSLYPGTETMGLRTCAGESKDYALHVGDGSSDPEVLLNIENQRRGQELSATRQAHDLSPAAESSSTFSFSGRDSSFTEVPRSPKHAHSSSLQQAASRSPSFGDPQLSPEARPSTGKPKHEWFLQKDSEGDTPSLINWPSRVKVREKLVKEESARNSPELASESVTQRRHQPAPVHYVSFQSEHSAFDRVPSKAAGSTRQPIRGYVQPADTGHTAKLVTPETPENASECSWVASATQNVPKPPSLTVLEGDGRDSPVLHVCESKAEEEEGEGEGEEKEEDVCFTEALEQSKKTLLALEGDGLVRSPEDPSRNEDFGKPAVSTVTLEHQKELENVAQPPQAPHQPTERTGRSEMVLYIQSEPVSQDAKPTGHNREASKKRKVRTRSLSDFTGPPQLQALKYKDPASRRELELPSSKTEGPYGEISMLDTKVSVAQLRSAFLASANACRRPELKSRVERSAEGPGLPTGVERERGSRKPRRYFSPGESRKTSERFRTQPITSAERKESDRCTSHSETPTVDDEEKVDERAKLSVAAKRLLFREMEKSFDEQNVPKRRSRNTAVEQRLRRLQDRSLTQPITTEEVVIAATEPIPASCSGGTHPVMARLPSPTVARSAVQPARLQASAHQKALAKDQTNEGKELAEQGEPDSSTLSLAEKLALFNKLSQPVSKAISTRNRIDTRQRRMNARYQTQPVTLGEVEQVQSGKLIPFSPAVNTSVSTVASTVAPMYAGDLRTKPPLDHNASATDYKFSSSIENSDSPVRSILKSQAWQPLVEGSENKGMLREYGETESKRALTGRDSGMEKYGSFEEAEASYPILNRAREGDSHKESKYAVPRRGSLERANPPITHLGDEPKEFSMAKMNAQGNLDLRDRLPFEEKVEVENVMKRKFSLRAAEFGEPTSEQTGTAAGKTIAQTTAPVSWKPQDSSEQPQEKLCKNPCAMFAAGEIKTPTGEGLLDSPSKTMSIKERLALLKKSGEEDWRNRLSRRQEGGKAPASSLHTQEAGRSLIKKRVTESRESQMTIEERKQLITVREEAWKTRGRGAANDSTQFTVAGRMVKKGLASPTAITPVASPICGKTRGTTPVSKPLEDIEARPDMQLESDLKLDRLETFLRRLNNKVGGMHETVLTVTGKSVKEVMKPDDDETFAKFYRSVDYNMPRSPVEMDEDFDVIFDPYAPKLTSSVAEHKRAVRPKRRVQASKNPLKMLAAREDLLQEYTEQRLNVAFMESKRMKVEKMSSNSNFSEVTLAGLASKENFSNVSLRSVNLTEQNSNNSAVPYKRLMLLQIKGRRHVQTRLVEPRASALNSGDCFLLLSPHCCFLWVGEFANVIEKAKASELATLIQTKRELGCRATYIQTIEEGINTHTHAAKDFWKLLGGQTSYQSAGDPKEDELYEAAIIETNCIYRLMDDKLVPDDDYWGKIPKCSLLQPKEVLVFDFGSEVYVWHGKEVTLAQRKIAFQLAKHLWNGTFDYENCDINPLDPGECNPLIPRKGQGRPDWAIFGRLTEHNETILFKEKFLDWTELKRSNEKNPGELAQHKEDPRTDVKAYDVTRMVSMPQTTAGTILDGVNVGRGYGLVEGHDRRQFEITSVSVDVWHILEFDYSRLPKQSIGQFHEGDAYVVKWKFMVSTAVGSRQKGEHSVRAAGKEKCVYFFWQGRHSTVSEKGTSALMTVELDEERGAQVQVLQGKEPPCFLQCFQGGMVVHSGRREEEEENVQSEWRLYCVRGEVPVEGNLLEVACHCSSLRSRTSMVVLNVNKALIYLWHGCKAQAHTKEVGRTAANKIKEQCPLEAGLHSSSKVTIHECDEGSEPLGFWDALGRRDRKAYDCMLQDPGSFNFAPRLFILSSSSGDFAATEFVYPARAPSVVSSMPFLQEDLYSAPQPALFLVDNHHEVYLWQGWWPIENKITGSARIRWASDRKSAMETVLQYCKGKNLKKPAPKSYLIHAGLEPLTFTNMFPSWEHREDIAEITEMDTEVSNQITLVEDVLAKLCKTIYPLADLLARPLPEGVDPLKLEIYLTDEDFEFALDMTRDEYNALPAWKQVNLKKAKGLF

SEQ ID NO: 36820 - protein, 963 aa, Homo sapiens
  REGION 1..963: note = ENSP00000488171
  VARIANT 1: note = Any amino acid
XPQEKLCKNPCAMFAAGEIKTPTGEGLLDSPSKTMSIKERLALLKKSGEEDWRNRLSRRQEGGKAPASSLHTQEAGRSLIKKEEGGVADDSAISNLLWRVTESRESQMTIEERKQLITVREEAWKTRGRGAANDSTQFTVAGRMVKKGLASPTAITPVASPICGKTRGTTPVSKPLEDIEARPDMQLESDLKLDRLETFLRRLNNKVGGMHETVLTVTGKSVKEVMKPDDDETFAKFYRSVDYNMPRSPVEMDEDFDVIFDPYAPKLTSSVAEHKRAVRPKRRVQASKNPLKMLAAREDLLQEYTEQRLNVAFMESKRMKVEKMSSNSNFSEVTLAGLASKENFSNVSLRSVNLTEQNSNNSAVPYKRLMLLQIKGRRHVQTRLVEPRASALNSGDCFLLLSPHCCFLWVGEFANVIEKAKASELATLIQTKRELGCRATYIQTIEEGINTHTHAAKDFWKLLGGQTSYQSAGDPKEDELYEAAIIETNCIYRLMDDKLVPDDDYWGKIPKCSLLQPKEVLVFDFGSEVYVWHGKEVTLAQRKIAFQLAKHLWNGTFDYENCDINPLDPGECNPLIPRKGQGRPDWAIFGRLTEHNETILFKEKFLDWTELKRSNEKNPGELAQHKEDPRTDVKAYDVTRMVSMPQTTAGTILDGVNVGRGYGLVEGHDRRQFEITSVSVDVWHILEFDYSRLPKQSIGQFHEGDAYVVKWKFMVSTAVGSRQKGEHSVRAAGKEKCVYFFWQGRHSTVSEKGTSALMTVELDEERGAQVQVLQGKEPPCFLQCFQGGMVVHSGRREEEEENVQSEWRLYCVRGEVPVEGNLLEVACHCSSLRSRTSMVVLNVNKALIYLWHGCKAQAHTKEVGRTAANKIKEQCPLEAGLHSSSKVTIHECDEGSEPLGFWDALGRRDRKAYDCMLQDPGSFNFAPRLFILSSSSGDFAATEFVYPARAPSVVSSMPFLQED

SEQ ID NO: 36821 - protein, 2182 aa, Homo sapiens
  REGION 1..2182: note = ENSP00000364547
MKRKERIARRLEGIENDTQPILLQSCTGLVTHRLLEEDTPRYMRASDPASPHIGRSNEEEETSDSSLEKQTRSKYCTETSGVHGDSPYGSGTMDTHSLESKAERIARYKAERRRQLAEKYGLTLDPEADSEYLSRYTKSRKEPDAVEKRGGKSDKQEESSRDASSLYPGTETMGLRTCAGESKDYALHVGDGSSDPEVLLNIENQRRGQELSATRQAHDLSPAAESSSTFSFSGRDSSFTEVPRSPKHAHSSSLQQAASRSPSFGDPQLSPEARPSTGKPKHEWFLQKDSEGDTPSLINWPSRVKVREKLVKEESARNSPELASESVTQRRHQPAPVHYVSFQSEHSAFDRVPSKAAGSTRQPIRGYVQPADTGHTAKLVTPETPENASECSWVASATQNVPKPPSLTVLEGDGRDSPVLHVCESKAEEEEGEGEGEEKEEDVCFTEALEQSKKTLLALEGDGLVRSPEDPSRNEDFGKPAVSTVTLEHQKELENVAQPPQAPHQPTERTGRSEMVLYIQSEPVSQDAKPTGHNREASKKRKVRTRSLSDFTGPPQLQALKYKDPASRRELELPSSKTEGPYGEISMLDTKVSVAQLRSAFLASANACRRPELKSRVERSAEGPGLPTGVERERGSRKPRRYFSPGESRKTSERFRTQPITSAERKESDRCTSHSETPTVDDEEKVDERAKLSVAAKRLLFREMEKSFDEQNVPKRRSRNTAVEQRLRRLQDRSLTQPITTEEVVIAATLQASAHQKALAKDQTNEGKELAEQGEPDSSTLSLAEKLALFNKLSQPVSKAISTRNRIDTRQRRMNARYQTQPVTLGEVEQVQSGKLIPFSPAVNTSVSTVASTVAPMYAGDLRTKPPLDHNASATDYKFSSSIENSDSPVRSILKSQAWQPLVEGSENKGMLREYGETESKRALTGRDSGMEKYGSFEEAEASYPILNRAREGDSHKESKYAVPRRGSLERANPPITHLGDEPKEFSMAKMNAQGNLDLRDRLPFEEKVEVENVMKRKFSLRAAEFGEPTSEQTGTAAGKTIAQTTAPVSWKPQDSSEQPQEKLCKNPCAMFAAGEIKTPTGEGLLDSPSKTMSIKERLALLKKSGEEDWRNRLSRRQEGGKAPASSLHTQEAGRSLIKKRVTESRESQMTIEERKQLITVREEAWKTRGRGAANDSTQFTVAGRMVKKGLASPTAITPVASPICGKTRGTTPVSKPLEDIEARPDMQLESDLKLDRLETFLRRLNNKVGGMHETVLTVTGKSVKEVMKPDDDETFAKFYRSVDYNMPRSPVEMDEDFDVIFDPYAPKLTSSVAEHKRAVRPKRRVQASKNPLKMLAAREDLLQEYTEQRLNVAFMESKRMKVEKMSSNSNFSEVTLAGLASKENFSNVSLRSVNLTEQNSNNSAVPYKRLMLLQIKGRRHVQTRLVEPRASALNSGDCFLLLSPHCCFLWVGEFANVIEKAKASELATLIQTKRELGCRATYIQTIEEGINTHTHAAKDFWKLLGGQTSYQSAGDPKEDELYEAAIIETNCIYRLMDDKLVPDDDYWGKIPKCSLLQPKEVLVFDFGSEVYVWHGKEVTLAQRKIAFQLAKHLWNGTFDYENCDINPLDPGECNPLIPRKGQGRPDWAIFGRLTEHNETILFKEKFLDWTELKRSNEKNPGELAQHKEDPRTDVKAYDVTRMVSMPQTTAGTILDGVNVGRGYGLVEGHDRRQFEITSVSVDVWHILEFDYSRLPKQSIGQFHEGDAYVVKWKFMVSTAVGSRQKGEHSVRAAGKEKCVYFFWQGRHSTVSEKGTSALMTVELDEERGAQVQVLQGKEPPCFLQCFQGGMVVHSGRREEEEENVQSEWRLYCVRGEVPVEGNLLEVACHCSSLRSRTSMVVLNVNKALIYLWHGCKAQAHTKEVGRTAANKIKEQCPLEAGLHSSSKVTIHECDEGSEPLGFWDALGRRDRKAYDCMLQDPGSFNFAPRLFILSSSSGDFAATEFVYPARAPSVVSSMPFLQEDLYSAPQPALFLVDNHHEVYLWQGWWPIENKITGSARIRWASDRKSAMETVLQYCKGKNLKKPAPKSYLIHAGLEPLTFTNMFPSWEHREDIAEITEMDTEVSNQITLVEDVLAKLCKTIYPLADLLARPLPEGVDPLKLEIYLTDEDFEFALDMTRDEYNALPAWKQVNLKKAKGLF

SEQ ID NO: 36822 - protein, 548 aa, Homo sapiens
  REGION 1..548: note = ENSP00000479104
MEEDLFQLRQLPVVKFRRTGESARSEDDTASGEHEVQIEGVHVGLEAVELDDGAAVPKEFANPTDDTFMVEDAVEAIGFGKFQWKLSVLTGLAWMADAMEMMILSILAPQLHCEWRLPSWQVALLTSVVFVGMMSSSTLWGNISDQYGRKTGLKISVLWTLYYGILSAFAPVYSWILVLRGLVGFGIGGVPQSVTLYAEFLPMKARAKCILLIEVFWAIGTVFEVVLAVFVMPSLGWRWLLILSAVPLLLFAVLCFWLPESARYDVLSGNQEKAIATLKRIATENGAPMPLGKLIISRQEDRGKMRDLFTPHFRWTTLLLWFIWFSNAFSYYGLVLLTTELFQAGDVCGISSRKKAVEAKCSLACEYLSEEDYMDLLWTTLSEFPGVLVTLWIIDRLGRKKTMALCFVIFSFCSLLLFICVGRNVLTLLLFIARAFISGGFQAAYVYTPEVYPTATRALGLGTCSGMARVGALITPFIAQVMLESSVYLTLAVYSGCCLLAALASCFLPIETKGRGLQESSHREWGQEMVGRGMHGAGVTRSNSGSQE

SEQ ID NO: 36823 - protein, 104 aa, Homo sapiens
  REGION 1..104: note = ENSP00000447583
MEEDLFQLRQLPVVKFRRTGESARSEDDTASGEHEVQIEGVHVGLEAVELDDGAAVPKEFANPTDGGLCRHDVQLHALGKYLRPVRQENRAEDQRAVDSVLWHP

SEQ ID NO: 36824 - protein, 155 aa, Homo sapiens
  REGION 1..155: note = ENSP00000447275
MEEDLFQLRQLPVVKFRRTGESARSEDDTASGEHEVQIEGVHVGLEAVELDDGAAVPKEFANPTDDTFMVEDAVEAIGFGKFQWKLSVLTGLAWVVFVGMMSSSTLWGNISDQYGRKTGLKISVLWTLYYGILSAFAPVYSWILVLRGLVGFGIG

SEQ ID NO: 36825 - protein, 527 aa, Homo sapiens
  REGION 1..527: note = ENSP00000399056
MGSLKEELLKAIWHAFTALDQDHSGKVSKSQLKVLSHNLCTVLKVPHDPVALEEHFRDDDEGPVSNQGYMPYLNRFILEKIEYLLKKLTEAMGGGWQQEQFEHYKINFDDSKNGLSAWELIELIGNGQFSKGMDRQTVSMAINEVFNELILDVLKQGYMMKKGHRRKNWTERWFVLKPNIISYYVSEDLKDKKGDILLDENCCVESLPDKDGKKCLFLVKCFDKTFEISASDKKKKQEWIQAIHSTIHLLKLGSPPPHKEARQRRKELRKKQLAEQEELERQMKELQAANESKQQELEAVRKKLEEAASRAAEEEKKRLQTQVELQARFSTELEREKLIRQQMEEQVAQKSSELEQYLQRVRELEDMYLKLQEALEDERQARQDEETVRKLQARLLEEESSKRAELEKWHLEQQQAIQTTEAEKQELENQRVLKEQALQEAMEQLEQLELERKQALEQYEEVKKKLEMATNKTKSWKDKVAHHEGLIRLIEPGSKNPHLITNWGPAAFTEAELEEREKNWKEKKTTE

SEQ ID NO: 36826 - protein, 585 aa, Homo sapiens
  REGION 1..585: note = ENSP00000315630
MGSLKEELLKAIWHAFTALDQDHSGKVSKSQLKVLSHNLCTVLKVPHDPVALEEHFRDDDEGPVSNQGYMPYLNRFILEKVQDNFDKIEFNRMCWTLCVKKNLTKNPLLITEEDAFKIWVIFNFLSEDKYPLIIVSEEIEYLLKKLTEAMGGGWQQEQFEHYKINFDDSKNGLSAWELIELIGNGQFSKGMDRQTVSMAINEVFNELILDVLKQGYMMKKGHRRKNWTERWFVLKPNIISYYVSEDLKDKKGDILLDENCCVESLPDKDGKKCLFLVKCFDKTFEISASDKKKKQEWIQAIHSTIHLLKLGSPPPHKEARQRRKELRKKQLAEQEELERQMKELQAANESKQQELEAVRKKLEEAASRAAEEEKKRLQTQVELQARFSTELEREKLIRQQMEEQVAQKSSELEQYLQRVRELEDMYLKLQEALEDERQARQDEETVRKLQARLLEEESSKRAELEKWHLEQQQAIQTTEAEKQELENQRVLKEQALQEAMEQLEQLELERKQALEQYEEVKKKLEMATNKTKSWKDKVAHHEGLIRLIEPGSKNPHLITNWGPAAFTEAELEEREKNWKEKKTTE

SEQ ID NO: 36827 - protein, 149 aa, Homo sapiens
  REGION 1..149: note = ENSP00000431768
MGSLKEELLKAIWHAFTALDQDHSGKVSKSQLKVLSHNLCTVLKVPHDPVALEEHFRDDDEGPVSNQGYMPYLNRFILEKITKTLPASEPSDMLLPVLSKTTLTRLNSIGCVGPSVSKKTSQRIPCSLQKKMHLKYGLFSTFYLRTSIH

SEQ ID NO: 36828 - protein, 226 aa, Homo sapiens
  REGION 1..226: note = ENSP00000435587
MGGGWQQEQFEHYKINFDDSKNGLSAWELIELIGNGQFSKGMDRQTVSMAINEVFNELILDVLKQGYMMKKGHRRKNWTERWFVLKPNIISYYVSEDLKDKKGDILLDENCCVESLPDKDGKKCLFLVKCFDKTFEISASDKKKKQEWIQAIHSTIHLLKLGSPPPHKEARQRRKELRKKQLAEQEELERQMKELQAANESKQQELEAVRKKLEEAASRAAEEEKK

SEQ ID NO: 36829 - protein, 23 aa, Homo sapiens
  REGION 1..23: note = ENSP00000433824
  VARIANT 1: note = Any amino acid
XFPVGLGQSSSFRILRGQAERVT

SEQ ID NO: 36830 - protein, 352 aa, Homo sapiens
  REGION 1..352: note = ENSP00000369500
MFRGLSSWLGLQQPVAGGGQPNGDAPPEQPSETVAESAEEELQQAGDQELLHQAKDFGNYLFNFASAATKKITESVAETAQTIKKSVEEGKIDGIIDKTIIGDFQKEQKKFVEEQHTKKSEAAVPPWVDTNDEETIQQQILALSADKRNFLRDPPAGVQFNFDFDQMYPVALVMLQEDELLSKMRFALVPKLVKEEVFWRNYFYRVSLIKQSAQLTALAAQQQAAGKEEKSNGREQDLPLAEAVRPKTPPVVIKSQLKTQEDEEEISTSPGVSEFVSDAFDACNLNQEDLRKEMEQLVLDKKQEETAVLEEDSADWEKELQQELQEYEVVTESEKRDENWDKEIEKMLQEEN

SEQ ID NO: 36831 - protein, 976 aa, Homo sapiens
  REGION 1..976: note = ENSP00000358535
MEKQKPFALFVPPRSSSSQVSAVKPQTLGGDSTFFKSFNKCTEDDFEFPFAKTNLSKNGENIDSDPALQKVNFLPVLEQVGNSDCHYQEGLKDSDLENSEGLSRVYSKLYKEAEKIKKWKVSTEAELRQKESKLQENRKIIEAQRKAIQELQFGNEKVSLKLEEGIQENKDLIKENNATRHLCNLLKETCARSAEKTKKYEYEREETRQVYMDLNNNIEKMITAFEELRVQAENSRLEMHFKLKEDYEKIQHLEQEYKKEINDKEKQVSLLLIQITEKENKMKDLTFLLEESRDKVNQLEEKTKLQSENLKQSIEKQHHLTKELEDIKVSLQRSVSTQKALEEDLQIATKTICQLTEEKETQMEESNKARAAHSFVVTEFETTVCSLEELLRTEQQRLEKNEDQLKILTMELQKKSSELEEMTKLTNNKEVELEELKKVLGEKETLLYENKQFEKIAEELKGTEQELIGLLQAREKEVHDLEIQLTAITTSEQYYSKEVKDLKTELENEKLKNTELTSHCNKLSLENKELTQETSDMTLELKNQQEDINNNKKQEERMLKQIENLQETETQLRNELEYVREELKQKRDEVKCKLDKSEENCNNLRKQVENKNKYIEELQQENKALKKKGTAESKQLNVYEIKVNKLELELESAKQKFGEITDTYQKEIEDKKISEENLLEEVEKAKVIADEAVKLQKEIDKRCQHKIAEMVALMEKHKHQYDKIIEERDSELGLYKSKEQEQSSLRASLEIELSNLKAELLSVKKQLEIEREEKEKLKREAKENTATLKEKKDKKTQTFLLETPEIYWKLDSKAVPSQTVSRNFTSVDHGISKDKRDYLWTSAKNTLSTPLPKAYTVKTPTKPKLQQRENLNIPIEESKKKRKMAFEFDINSDSSETTDLLSMVSEEETLKTLYRNNNPPASHLCVKTPKKAPSSLTTPGSTLKFGAIRKMREDRWAVIAKMDRKKKLKEAEKLFV

SEQ ID NO: 36832 - protein, 792 aa, Homo sapiens
  REGION 1..792: note = ENSP00000410011
MEKQKPFALFVPPRSSSSQVSAVKPQTLGGDSTFFKSFNKCTEDDFEFPFAKTNLSKNGENIDSDPALQKVNFLPVLEQVGNSDCHYQEGLKDSDLENSEGLSRVYSKLYKEAEKIKKWKVSTEAELRQKESKLQENRKIIEAQRKAIQELQFGNEKVSLKLEEGIQENKDLIKENNATRHLCNLLKETCARSAEKTKKYEYEREETRQVYMDLNNNIEKMITAFEELRVQAENSRLEMHFKLKEDYEKIQHLEQEYKKEINDKEKQVSLLLIQITEKENKMKDLTFLLEESRDKVNQLEEKTKLQSENLKQSIEKQHHLTKELEDIKVSLQRSVSTQKALEEDLQIATKTICQLTEEKETQMEESNKARAAHSFVVTEFETTVCSLEELLRTEQQRLEKNEDQLKILTMELQKKSSELEEMTKLTNNKEVELEELKKVLGEKETLLYENKQFEKIAEELKGTEQELIGLLQAREKEVHDLEIQLTAITTSEQYYSKEVKDLKTELENEKLKNTELTSHCNKLSLENKELTQETSDMTLELKNQQEDINNNKKQEERMLKQIENLQETETQLRNELEYVREELKQKRDEVKCKLDKSEENCNNLRKQVENKNKYIEELQQENKALKKKGTAESKQLNVYEIKVNKLELELESAKQKFGEITDTYQKEIEDKKISEENLLEEVEKAKVIADEAVKLQKEIDKRCQHKIAEMVALMEKHKHQYDKIIEERDSELGLYKSKEQEQSSLRASLEIELSNLKAELLSVKKQLEIEREEKEKLKREAKENTATLKEKK

SEQ ID NO: 36833 - protein, 976 aa, Homo sapiens; identical to SEQ ID NO: 36831
  REGION 1..976: note = ENSP00000358531

SEQ ID NO: 36834 - protein, 976 aa, Homo sapiens; identical to SEQ ID NO: 36831
  REGION 1..976: note = ENSP00000480997

SEQ ID NO: 36835 - protein, 951 aa, Homo sapiens
  REGION 1..951: note = ENSP00000482532
MEKQKPFALFVPPRSSSSQVSAVKPQTLGGDSTFFKSFNKCTEDDFEFPFAKTNLSKNGENIDSDPALQKVNFLPVLEQVGNSDCHYQEGLKDSDLENSEGLSRVYSKLYKEAEKIKKWKVSTEAELRQKESKLQENRKIIEAQRKAIQELQFGNEKVSLKLEEGIQENKDLIKENNATRHLCNLLKETCARSAEKTKKYEYEREETRQVYMDLNNNIEKMITAFEELRVQAENSRLEMHFKLKEDYEKIQHLEQEYKKEINDKEKQVSLLLIQITEKENKMKDLTFLLEESRDKVNQLEEKTKLQSENLKQSIEKQHHLTKELEDIKVSLQRSVSTQKALEEDLQIATKTICQLTEEKETQMEESNKARAAHSFVVTEFETTVCSLEELLRTEQQRLEKNEDQLKILTMELQKKSSELEEMTKLTNNKEVELEELKKVLGEKETLLYENKQFEKIAEELKGTEQELIGLLQAREKEVHDLEIQLTAITTSEQYYSKEVKDLKTELENEKLKNTELTSHCNKLSLENKELTQETSDMTLELKNQQEDINNNKKQEERMLKQIENLQETETQLRNELEYVREELKQKRDEVKCKLDKSEENCNNLRKQVENKNKYIEELQQENKALKKKGTAESKQLNVYEIKVNKLELELESAKQKFGEITDTYQKEIEDKKISEENLLEEVEKAKVIADEAVKLQKEIDKRCQHKIAEMVALMEKHKHQYDKIIEERDSELGLYKSKEQEQSSLRASLEKLKREAKENTATLKEKKDKKTQTFLLETPEIYWKLDSKAVPSQTVSRNFTSVDHGISKDKRDYLWTSAKNTLSTPLPKAYTVKTPTKPKLQQRENLNIPIEESKKKRKMAFEFDINSDSSETTDLLSMVSEEETLKTLYRNNNPPASHLCVKTPKKAPSSLTTPGSTLKFGAIRKMREDRWAVIAKMDRKKKLKEAEKLFV

SEQ ID NO: 36836 - protein, 580 aa, Homo sapiens
  REGION 1..580: note = ENSP00000351614
MNFLRRRLSDSSFMANLPNGYMTDLQRPDSSTSSPASPAMERRHPQPLAASFSSPGSSLFSSLSSAMKQAPQATSGLMEPPGPSTPIVQRPRILLVIDDAHTDWSKYFHGKKVNGEIEIRVEQAEFSELNLAAYVTGGCMVDMQVVRNGTKVVSRSFKPDFILVRQHAYSMALGEDYRSLVIGLQYGGLPAVNSLYSVYNFCSKPWVFSQLIKIFHSLGPEKFPLVEQTFFPNHKPMVTAPHFPVVVKLGHAHAGMGKIKVENQLDFQDITSVVAMAKTYATTEAFIDSKYDIRIQKIGSNYKAYMRTSISGNWKANTGSAMLEQVAMTERYRLWVDSCSEMFGGLDICAVKAVHSKDGRDYIIEVMDSSMPLIGEHVEEDRQLMADLVVSKMSQLPMPGGTAPSPLRPWAPQIKSAKSPGQAQLGPQLGQPQPRPPPQGGPRQAQSPQPQRSGSPSQQRLSPQGQQPLSPQSGSPQQQRSPGSPQLSRASSGSSPNQASKPGATLASQPRPPVQGRSTSQQGEESKKPAPPHPHLNKSQSLTNSLSTSDTSQRGTPSEDEAKAETIRNLRKSFASLFSD

SEQ ID NO: 36837 - protein, 123 aa, Homo sapiens
  REGION 1..123: note = ENSP00000395794
MNFLRRRLSDSSFMANLPNGYMTDLQRPDSSTSSPASPAMERRHPQPLAASFSSPGSSLFSSLSSAMKQAPQATSGLMEPPGPSTPIVQRPRILLVIDDAHTDWSKYFHGKKVNGEIEIRVEQ

SEQ ID NO: 36838 - protein, 113 aa, Homo sapiens
  REGION 1..113: note = ENSP00000388582
MNFLRRRLSDSSFMANLPNGYMTDLQRPDSSTSSPASPAMERRHPQPLAASFSSPGSSLFSSLSSAMKQAPQATSGLMEPPGPSTPIVQRPRILLVIDDAHTDWSKYFHGKKV

SEQ ID NO: 36839 - protein, 187 aa, Homo sapiens [sequence omitted]

SEQ ID NO: 36840 - protein, 323 aa, Homo sapiens [sequence omitted]

SEQ ID NO: 36841 - protein, 258 aa, Homo sapiens
  REGION 1..258: note = ENSP00000366058
MDGIIEQKSMLVHSKISDAGKRNGLINTRNLMAESRDGLVSVYPAPQYQSHRVGASTVPASLDSSRSEPMQQLLDPNTLQQSVESRYRPNIILYSEGVLRSWGDGVAADCCETTFIEDRSPTKDSLEYPDGKFIDLSADDIKIHTLSYDVEEEEEFQELESDYSSDTESEDNFLMMPPRDHLGLSVFSMLCCFWPLGIAAFYLSHETNKAVAKGDLHQASTSSRRALFLAVLSITIGTGVYVGVAVALIAYLSKNNHL

SEQ ID NO: 36842 - protein, 238 aa, Homo sapiens
  REGION 1..238: note = ENSP00000450439
MESLSELQNPLLPRSPAHLHGPYPYPETPPSWSCQEKLYSYLLGGAGPAGAHQLLDPGSLQLAVEAWYRPSCLLGRDKVKEPRAGSCETSFTEDREPQEGPPEQPTGPGQAAENVTIQTVSYGVQEELRDQEDDQEEEESDATSTESESEDNFLTLPPRDHLGLTLFSMLCCFWPLGIAAFYFSQGTSKAISKGDFRLASTTSRRALFLATLAIAVGAGLYVAVVVALAAYMSQNGHG

SEQ ID NO: 36843 - protein, 80 aa, Homo sapiens
  REGION 1..80: note = ENSP00000451519
MESLSELQNPLLPRSPAHLHGPYPYPETPPSWSCQEKLYSYLLGGAGPAGAHQLLDPGSLQLAVEAWYRPSCLLGRDKVK

SEQ ID NO: 36844 - protein, 238 aa, Homo sapiens; identical to SEQ ID NO: 36842
  REGION 1..238: note = ENSP00000331474

SEQ ID NO: 36845 - protein, 1496 aa, Homo sapiens
  REGION 1..1496: note = ENSP00000347792
MALSKGLRLLGRLGAEGDCSVLLEARGRDDCLLFEAGTVATLAPEEKEVIKGQYGKLTDAYGCLGELRLKSGGTSLSFLVLVTGCTSVGRIPDAEIYKITATDFYPLQEEAKEEERLIALKKILSSGVFYFSWPNDGSRFDLTVRTQKQGDDSSEWGNSFFWNQLLHVPLRQHQVSCCDWLLKIICGVVTIRTVYASHKQAKACLVSRVSCERTGTRFHTRGVNDDGHVSNFVETEQMIYMDDGVSSFVQIRGSVPLFWEQPGLQVGSHHLRLHRGLEANAPAFDRHMVLLKEQYGQQVVVNLLGSRGGEEVLNRAFKKLLWASCHAGDTPMINFDFHQFAKGGKLEKLETLLRPQLKLHWEDFDVFTKGENVSPRFQKGTLRMNCLDCLDRTNTVQSFIALEVLHLQLKTLGLSSKPIVDRFVESFKAMWSLNGHSLSKVFTGSRALEGKAKVGKLKDGARSMSRTIQSNFFDGVKQEAIKLLLVGDVYGEEVADKGGMLLDSTALLVTPRILKAMTERQSEFTNFKRIRIAMGTWNVNGGKQFRSNVLRTAELTDWLLDSPQLSGATDSQDDSSPADIFAVGFEEMVELSAGNIVNASTTNKKMWGEQLQKAISRSHRYILLTSAQLVGVCLYIFVRPYHVPFIRDVAIDTVKTGMGGKAGNKGAVGIRFQFHSTSFCFICSHLTAGQSQVKERNEDYKEITQKLCFPMGRNVFSHDYVFWCGDFNYRIDLTYEEVFYFVKRQDWKKLLEFDQLQLQKSSGKIFKDFHEGAINFGPTYKYDVGSAAYDTSDKCRTPAWTDRVLWWRKKHPFDKTAGELNLLDSDLDVDTKVRHTWSPGALQYYGRAELQASDHRPVLAIVEVEVQEVDVGARERVFQEVSSFQGPLDATVVVNLQSPTLEEKNEFPEDLRTELMQTLGSYGTIVLVRINQGQMLVTFADSHSALSVLDVDGMKVKGRAVKIRPKTKDWLKGLREEIIRKRDSMAPVSPTANSCLLEENFDFTSLDYESEGDILEDDEDYLVDEFNQPGVSDSELGGDDLSDVPGPTALAPPSKSPALTKKKQHPTYKDDADLVELKRELEAVGEFRHRSPSRSLSVPNRPRPPQPPQRPPPPTGLMVKKSASDASISSGTHGQYSILQTARLLPGAPQQPPKARTGISKPYNVKQIKTTNAQEAEAAIRCLLEARGGASEEALSAVAPRDLEASSEPEPTPGAAKPETPQAPPLLPRRPPPRVPAIKKPTLRRTGKPLSPEEQFEQQTVHFTIGPPETSVEAPPVVTAPRVPPVPKPRTFQPGKAAERPSHRKPASDEAPPGAGASVPPPLEAPPLVPKVPPRRKKSAPAAFHLQVLQSNSQLLQGLTYNSSDSPSGHPPAAGTVFPQGDFLSTSSATSPDSDGTKAMKPEAAPLLGDYQDPFWNLLHHPKLLNNTWLSKSSDPLDSGTRSPKRDPIDPVSAGASAAKAELPPDHEHKTLGHWVTISDQEKRTALQVFDPLAKT

SEQ ID NO: 36846 - protein, 1288 aa, Homo sapiens
  REGION 1..1288: note = ENSP00000492532
MALSKGLRLLGRLGAEGDCSVLLEARGRDDCLLFEAGTVATLAPEEKEVIKGQYGKLTDAYGCLGELRLKSGGTSLSFLVLVTGCTSVGRIPDAEIYKITATDFYPLQEEAKEEERLIALKKILSSGVFYFSWPNDGSRFDLTVRTQKQGDDSSEWGNSFFWNQLLHVPLRQHQVSCCDWLLKIICGVVTIRTVYASHKQAKACLVSRVSCERTGTRFHTRGVNDDGHVSNFVETEQMIYMDDGVSSFVQIRGSVPLFWEQPGLQVGSHHLRLHRGLEANAPAFDRHMVLLKEQYGQQVVVNLLGSRGGEEVLNRAFKKLLWASCHAGDTPMINFDFHQFAKGGKLEKLETLLRPQLKLHWEDFDVFTKGENVSPRFQKGTLRMNCLDCLDRTNTVQSFIALEVLHLQLKTLGLSSKPIVDRFVESFKAMWSLNGHSLSKVFTGSRALEGKAKVGKLKDGARSMSRTIQSNFFDGVKQEAIKLLLVGDVYGEEVADKGGMLLDSTALLVTPRILKAMTERQSEFTNFKRIRIAMGTWNVNGGKQFRSNVLRTAELTDWLLDSPQLSGATDSQDDSSPADIFAVGFEEMVELSAGNIVNASTTNKKMWGEQLQKAISRSHRYILLTSAQLVGVCLYIFVRPYHVPFIRDVAIDTVKTGMGGKAGNKGAVGIRFQFHSTSFCFICSHLTAGQSQVKERNEDYKEITQKLCFPMGRNVFSHDYVFWCGDFNYRIDLTYEEVFYFVKRQDWKKLLEFDQLQLQKSSGKIFKDFHEGAINFGPTYKYDVGSAAYDTSDKCRTPAWTDRVLWWRKKHPFDKTAGELNLLDSDLDVDTKVRHTWSPGALQYYGRAELQASDHRPVLAIVEVEVQEVDVGARERVFQEVSSFQGPLDATVVVNLQSPTLEEKNEFPEDLRTELMQTLGSYGTIVLVRINQGQMLVTFADSHSALSVLDVDGMKVKGRAVKIRPKTKDWLKGLREEIIRKRDSMAPVSPTANSCLLEENFDFTSLDYESEGDILEDDEDYLVDEFNQPGVSDSELGGDDLSDVPGPTALAPPSKSPALTKKKQHPTYKDDADLVELKRELEAVGEFRHRSPSRSLSVPNRPRPPQPPQRPPPPTGLMVKKSASDASISSGTHGQYSILQTARLLPGAPQQPPKARTGISKPYNVKQIKTTNAQEAEAAIRCLLEARGGASEEALSAVAPRDLEASSEPEPTPGAAKPETPQAPPLLPRRPPPRVPAIKKPTLRRTGKIVFCSRSQASQPCLLLQRHEFVRTVAAQRLASVDTSGSSV

SEQ ID NO: 36847 - protein, 136 aa, Homo sapiens
  REGION 1..136: note = ENSP00000356080
  VARIANT 1: note = Any amino acid
XGRDDCLLFEAGTVATLAPEEKEVIKGQYGKLTDAYGCLGELRLKSGGTSLSFLVLVTGCTSVGRIPDAEIYKITATDFYPLQEEAKEEERLIALKKILSSGVFYFSWPNDGSRFDLTVRTQKQGDDSSEWGNSFF

SEQ ID NO: 36848 - protein, 1259 aa, Homo sapiens
  REGION 1..1259: note = ENSP00000492369
MIYMDDGVSSFVQIRGSVPLFWEQPGLQVGSHHLRLHRGLEANAPAFDRHMVLLKEQYGQQVVVNLLGSRGGEEVLNRAFKKLLWASCHAGDTPMINFDFHQFAKGGKLEKLETLLRPQLKLHWEDFDVFTKGENVSPRFQKGTLRMNCLDCLDRTNTVQSFIALEVLHLQLKTLGLSSKPIVDRFVESFKAMWSLNGHSLSKVFTGSRALEGKAKVGKLKDGARSMSRTIQSNFFDGVKQEAIKLLLVGDVYGEEVADKGGMLLDSTALLVTPRILKAMTERQSEFTNFKRIRIAMGTWNVNGGKQFRSNVLRTAELTDWLLDSPQLSGATDSQDDSSPADIFAVGFEEMVELSAGNIVNASTTNKKMWGEQLQKAISRSHRYILLTSAQLVGVCLYIFVRPYHVPFIRDVAIDTVKTGMGGKAGNKGAVGIRFQFHSTSFCFICSHLTAGQSQVKERNEDYKEITQKLCFPMGRNVFSHDYVFWCGDFNYRIDLTYEEVFYFVKRQDWKKLLEFDQLQLQKSSGKIFKDFHEGAINFGPTYKYDVGSAAYDTSDKCRTPAWTDRVLWWRKKHPFDKTAGELNLLDSDLDVDTKVRHTWSPGALQYYGRAELQASDHRPVLAIVEVEVQEVDVGARERVFQEVSSFQGPLDATVVVNLQSPTLEEKNEFPEDLRTELMQTLGSYGTIVLVRINQGQMLVTFADSHSALSVLDVDGMKVKGRAVKIRPKTKDWLKGLREEIIRKRDSMAPVSPTANSCLLEENFDFTSLDYESEGDILEDDEDYLVDEFNQPGVSDSELGGDDLSDVPGPTALAPPSKSPALTKKKQHPTYKDDADLVELKRELEAVGEFRHRSPSRSLSVPNRPRPPQPPQRPPPPTGLMVKKSASDASISSGTHGQYSILQTARLLPGAPQQPPKARTGISKPYNVKQIKTTNAQEAEAAIRCLLEARGGASEEALSAVAPRDLEASSEPEPTPGAAKPETPQAPPLLPRRPPPRVPAIKKPTLRRTGKPLSPEEQFEQQTVHFTIGPPETSVEAPPVVTAPRVPPVPKPRTFQPGKAAERPSHRKPASDEAPPGAGASVPPPLEAPPLVPKVPPRRKKSAPAAFHLQVLQSNSQLLQGLTYNSSDSPSGHPPAAGTVFPQGDFLSTSSATSPDSDGTKAMKPEAAPLLGDYQDPFWNLLHHPKLLNNTWLSKSSDPLDSGTRSPKRDPIDPVSAGASAAKAELPPDHEHKTLGHWVTISDQEKRTALQVFDPLAKT

SEQ ID NO: 36849 - protein, 136 aa, Homo sapiens
  REGION 1..136: note = ENSP00000411202
MFLYASGPAPPAGTCRWGGQGGTSLSFLVLVTGCTSVGRIPDAEIYKITATDFYPLQEEAKEEERLIALKKILSSGVFYFSWPNDGSRFDLTVRTQKQGDDSSEWGNSFFWNQLLHVPLRQHQVSCCDWLLKIICG

SEQ ID NO: 36850 - protein, 165 aa, Homo sapiens
  REGION 1..165: note = ENSP00000436657
  VARIANT 1: note = Any amino acid
XVSCCDWLLKIICGVVTIRTVYASHKQAKACLVSRVSCERTGTRFHTRGVNDDGHVSNFVETEQMIYMDDGVSSFVQIRGSVPLFWEQPGLQVGSHHLRLHRGLEANAPAFDRHMVLLKEQYGQQVVVNLLGSRGGEEVLNRAFKVRPGCPLHSWAGRQVAMVER

SEQ ID NO: 36851 - protein, 839 aa, Homo sapiens
  REGION 1..839: note = ENSP00000356089
MGGKAGNKGAVGIRFQFHSTSFCFICSHLTAGQSQVKERNEDYKEITQKLCFPMGRNVFSHDYVFWCGDFNYRIDLTYEEVFYFVKRQDWKKLLEFDQLQLQKSSGKIFKDFHEGAINFGPTYKYDVGSAAYDTSDKCRTPAWTDRVLWWRKKHPFDKTAGELNLLDSDLDVDTKVRHTWSPGALQYYGRAELQASDHRPVLAIVEVEVQEVDVGARERVFQEVSSFQGPLDATVVVNLQSPTLEEKNEFPEDLRTELMQTLGSYGTIVLVRINQGQMLVTFADSHSALSVLDVDGMKVKGRAVKIRPKTKDWLKGLREEIIRKRDSMAPVSPTANSCLLEENFDFTSLDYESEGDILEDDEDYLVDEFNQPGVSDSELGGDDLSDVPGPTALAPPSKSPALTKKKQHPTYKDDADLVELKRELEAVGEFRHRSPSRSLSVPNRPRPPQPPQRPPPPTGLMVKKSASDASISSGTHGQYSILQTARLLPGAPQQPPKARTGISKPYNVKQIKTTNAQEAEAAIRCLLEARGGASEEALSAVAPRDLEASSEPEPTPGAAKPETPQAPPLLPRRPPPRVPAIKKPTLRRTGKPLSPEEQFEQQTVHFTIGPPETSVEAPPVVTAPRVPPVPKPRTFQPGKAAERPSHRKPASDEAPPGAGASVPPPLEAPPLVPKVPPRRKKSAPAAFHLQVLQSNSQLLQGLTYNSSDSPSGHPPAAGTVFPQGDFLSTSSATSPDSDGTKAMKPEAAPLLGDYQDPFWNLLHHPKLLNNTWLSKSSDPLDSGTRSPKRDPIDPVSAGASAAKAELPPDHEHKTLGHWVTISDQEKRTALQVFDPLAKT

SEQ ID NO: 36852 - protein, 285 aa, Homo sapiens
  REGION 1..285: note = ENSP00000418994
MDPVSQLASAGTFRVLKEPLAFLRALELLFAIFAFATCGGYSGGLRLSVDCVNKTESNLSIDIAFAYPFRLHQVTFEVPTCEGKERQKLALIGDSSSSAEFFVTVAVFAFLYSLAATVVYIFFQNKYRENNRGPLIDFIVTVVFSFLWLVGSSAWAKGLSDVKVATDPKEVLLLMSACKQPSNKCMAIHSPVMSSLNTSVVFGFLNFILWAGNIWFVFKETGWHSSGQRYLSDPMEKHSSSYNQGGYNQDSYGSSSGYSQQASLGPTSDEFGQQPTGPTSFTNQI

SEQ ID NO: 36853 - protein, 34 aa, Homo sapiens
  REGION 1..34: note = ENSP00000402121
MDPVSQLASAGTFRVLKEPLAFLRALELVAPGDV

SEQ ID NO: 36854 - protein, 75 aa, Homo sapiens
  REGION 1..75: note = ENSP00000419441
MDPVSQLASAGTFRVLKEPLAFLRALELLFAIFAFATCGGYSGGLRLSVDCVNKTESNLSIDIAFAYPFRTSLSL

SEQ ID NO: 36855 - protein, 265 aa, Homo sapiens
  REGION 1..265: note = ENSP00000295894
MCMVIFAPLFAIFAFATCGGYSGGLRLSVDCVNKTESNLSIDIAFAYPFRLHQVTFEVPTCEGKERQKLALIGDSSSSAEFFVTVAVFAFLYSLAATVVYIFFQNKYRENNRGPLIDFIVTVVFSFLWLVGSSAWAKGLSDVKVATDPKEVLLLMSACKQPSNKCMAIHSPVMSSLNTSVVFGFLNFILWAGNIWFVFKETGWHSSGQRYLSDPMEKHSSSYNQGGYNQDSYGSSSGYSQQASLGPTSDEFGQQPTGPTSFTNQI

SEQ ID NO: 36856 - protein, 55 aa, Homo sapiens
  REGION 1..55: note = ENSP00000420383
MCMVIFAPLFAIFAFATCGGYSGGLRLSVDCVNKTESNLSIDIAFAYPFRTSLSL

SEQ ID NO: 36857 - protein, 51 aa, Homo sapiens
  REGION 1..51: note = ENSP00000420623
MCMVIFAPKGFLKRFFSGSLQKAFCNLCICNMRWLFWRPAAECGLRQQDRK

SEQ ID NO: 36858 - protein, 202 aa, Homo sapiens
  REGION 1..202: note = ENSP00000418929
MCMVIFAPLFAIFAFATCGGYSGGLRLSVDCVNKTESNLSIDIAFAYPFRLHQVTFEVPTCEGKERQKLALIGDSSSSAEFFVTVAVFAFLYSLAATVVYIFFQNKYRENNRGPLIDFIVTVVFSFLWLVGSSAWAKGLSDVKVATDPKEVLLLMSACKQPSNKCMAIHSPVMSSLNTSVLSEIQSAKALKKRERVATLTGL

SEQ ID NO: 36859 - protein, 276 aa, Homo sapiens
  REGION 1..276: note = ENSP00000418701
MCMVIFAPHNEECKSHFHLLFAIFAFATCGGYSGGLRLSVDCVNKTESNLSIDIAFAYPFRLHQVTFEVPTCEGKERQKLALIGDSSSSAEFFVTVAVFAFLYSLAATVVYIFFQNKYRENNRGPLIDFIVTVVFSFLWLVGSSAWAKGLSDVKVATDPKEVLLLMSACKQPSNKCMAIHSPVMSSLNTSVVFGFLNFILWAGNIWFVFKETGWHSSGQRYLSDPMEKHSSSYNQGGYNQDSYGSSSGYSQQASLGPTSDEFGQQPTGPTSFTNQI

SEQ ID NO: 36860 - protein, 201 aa, Homo sapiens
  REGION 1..201: note = ENSP00000418123
MCMVIFAPLFAIFAFATCGGYSGGLRLSVDCVNKTESNLSIDIAFAYPFRLHQVTFEVPTCEGKERQKLALIGDSSSSAEFFVTVAVFAFLYSLAATVVYIFFQNKYRENNRGPLIVFGFLNFILWAGNIWFVFKETGWHSSGQRYLSDPMEKHSSSYNQGGYNQDSYGSSSGYSQQASLGPTSDEFGQQPTGPTSFTNQI

SEQ ID NO: 36861 - protein, 523 aa, Homo sapiens
  REGION 1..523: note = ENSP00000228567
MSFHKEDGVNSLCQKALHIVTELCFAGQVEWEKCSGIFPRDRGSQGGSSTDISVSLLAVVVSFCGLALLVVSLFVFWKLCWPCWKSKPVTSNITTLPQSISSAPTEVFETEEKKEIKENEKPAVKAIEPAIKISHTSPDIPAEVQTALKEHLIKHARVQRQITEPTSSTRHSSFRRHLPRQMQVSSVDFSMGTEPVLQRGETTTSIGRIKPELYKQKSVDSEGNQNEDVKICGKLNFTLQYDYENELLVVKIIKALDLPAKDFTGTSDPYVKMYLLPDRKKKFQTRVHRKTLNPLFDETFQFPVAYDQLSNRKLHFSVYDFDRFSRHDMIGEVILDNLFEVSDLSREATVWKDIHCATTESIDLGEIMFSLCYLPTAGRMTLTVIKCRNLKAMDITGSSDPYVKVSLMCEGRRLKKRKTTTKKNTLNPVYNEAIIFDIPPENVDQVSLSIAVMDYDRVGHNEVIGVCRTGLDAEGLGRDHWNEMLAYHRKPITHWHPLLELPGRATSFDSQGSCPSPKPPSTP

SEQ ID NO: 36862 - protein, 194 aa, Homo sapiens
  REGION 1..194: note = ENSP00000444577
MSFHKEDGVNSLCQKALHIVTELCFAGQVEWEKCSGIFPRDRGSQGGSSTDISVSLLAVVVSFCGLALLVVSLFVFWKLCWPCWKSKPVTSNITTLPQSISSAPTEVFETEEKKEIKENEKPAVKAIEPAIKISHTSPDIPAEVQTALKEHLIKHARVQRQITEPTSSTRGWGKKKKKRILSTCNFVTMPRHPS

SEQ ID NO: 36863 - protein, 421 aa, Homo sapiens
  REGION 1..421: note = ENSP00000377520
MAVDVAEYHLSVIKSPPGWEVGVYAAGALALLGIAAVSLWKLWTSGSFPSPSPFPNYDYRYLQQKYGESCAEAREKRVPAWNAQRASTRGPPSRKGSLSIEDTFESISELGPLELMGRELDLAPYGTLRKSQSADSLNSISSVSNTFGQDFTLGQVEVSMEYDTASHTLNVAVMQGKDLLEREEASFESCFMRVSLLPDEQIVGISRIQRNAYSIFFDEKFSIPLDPTALEEKSLRFSVFGIDEDERNVSTGVVELKLSVLDLPLQPFSGWLYLQDQNKAADAVGEILLSLSYLPTAERLTVVVVKAKNLIWTNDKTTADPFVKVYLLQDGRKMSKKKTAVKRDDPNPVFNEAMIFSVPAIVLQDLSLRVTVAESSSDGRGDNVGHVIIGPSASGMGTTHWNQMLATLRRPVSMWHAVRRN

SEQ ID NO: 36864 - protein, 421 aa, Homo sapiens; identical to SEQ ID NO: 36863
  REGION 1..421: note = ENSP00000431400

SEQ ID NO: 36865 - protein, 421 aa, Homo sapiens; identical to SEQ ID NO: 36863
  REGION 1..421: note = ENSP00000435316

SEQ ID NO: 36866 - protein, 98 aa, Homo sapiens
  REGION 1..98: note = ENSP00000434709
MAVDVAEYHLSVIKSPPGWEVGVYAAGALALLGIAAVSLWKLWTSGSFPSPSPFPNYDYRYLQQKYGESCAEAREKRVPAWNAQRASTRGPPSRKGSL

SEQ ID NO: 36867 - protein, 574 aa, Homo sapiens
  REGION 1..574: note = ENSP00000355986
MAIEGGERTCGVHELICIRKVSPEAVGFLSAVGVFIILMLLLFLYINKKFCFENVGGFPDLGSEYSTRKNSQDKIYNSYMDKDEHGSSSESEDEALGKYHEALSRTHNSRLPLADSRQRNYAWETRQKYSPLSAEYDGYSSEASIDEGNCIQRMRRTPPLDELQPPPYQDDSGSPHLSCTPSEIGDSKCEFSHCSNSPRCSYNKCPSEGSTGHEIESFHNKGYEEDVPSDSTAVLSPEDMSAQGSSSQLPKPFDPEPEAKYGTLDVTFDYDSQEQKLLVTVTAVTDIPTYNRTGGNSWQVHLVLLPIKKQRAKTSIQRGPCPVFTETFKFNHVESEMIGNYAVRFRLYGVHRMKKEKIVGEKIFYLTKLNLQGKMSLPVILEPSYNHSGCDSQMSVSEMSCSESTSSCQSLEHGSVPEILIGLLYNATTGRLSAEVIKGSHFKNLAANRPPNGLFCCLKHLIGGQVYIIRDTYVKLTLLNSMGQEMSKCKTSIRRGQPNPVYKETFVFQVALFQLSDVTLILSVYNKRSMKRKEMIGWISLGLNSSGEEELNHWTEMKESKGQQVCRWHALLES

SEQ ID NO: 36868 - protein, 864 aa, Homo sapiens
  REGION 1..864: note = ENSP00000489897
MAFFRNFQQNLPSVSSLVDTISSAVEDLTTAVGEVSYALTDSVAEQVTSMMSGFRPEEESSVAEEAVDTSKQKNAGLTEVSKNTNCQKTQANLEHRAKQINTCKTSLKQDQGIHEERVFKHVNDRQQTLSEYQDTGNTGDSSLKGYMNNGGISVIRQNTRAGSICQELESTDRCKTIGVGISNNGKNDLKEVGYQEMKGNQKNANGINKLYEQKKYVGTDNCKKEEYSKSRHVYLGRDQENMGHFNKCKHLPDLGHSDHLKKAEKCVKSKASKGNECSGNECSLKDILTSNRHMTQKSIIKEDIHPAPSTNSKDKLSGKIEEQINSTKYCKVNEDIKPKKTEAISAKKGTAKSKDEKYSKIIPEKDNSYMDKDEHGSSSESEDEALGKYHEALSRTHNSRLPLADSRQRNYAWETRQKYSPLSAEYDGYSSEASIDEGNCIQRMRRTPPLDELQPPPYQDDSGSPHLSCTPSEIGDSKCEFSHCSNSPRCSYNKCPSEGSTGHEIESFHNKGYEEDVPSDSTAVLSPEDMSAQGSSSQLPKPFDPEPEAKYGTLDVTFDYDSQEQKLLVTVTAVTDIPTYNRTGGNSWQVHLVLLPIKKQRAKTSIQRGPCPVFTETFKFNHVESEMIGNYAVRFRLYGVHRMKKEKIVGEKIFYLTKLNLQGKMSLPVILEPSYNHSGCDSQMSVSEMSCSESTSSCQSLEHGSVPEILIGLLYNATTGRLSAEVIKGSHFKNLAANRPPNGLFCCLKHLIGGQVYIIRDTYVKLTLLNSMGQEMSKCKTSIRRGQPNPVYKETFVFQVALFQLSDVTLILSVYNKRSMKRKEMIGWISLGLNSSGEEELNHWTEMKESKGQQVCRWHALLES

SEQ ID NO: 36869 - protein, 86 aa, Homo sapiens
  REGION 1..86: note = ENSP00000489671
MAIEGGERTCGVHELICIRKDRVFLCGQAGVQWHHLGSLQLPPPGFKRFFCLSIPSNWDYSISRGSWIFVSCWGVYYLDAAPFSLY

SEQ ID NO: 36870 - protein, 555 aa, Homo sapiens
  REGION 1..555: note = ENSP00000418901
MAIEGGERTCGVHELICIRKVSPEAVGFLSAVGVFIILMLLLFLYINKKFCFENVGGFPDLGSEYSTRKNSQDKIYNSYMDKDEHGSSSESEDEALGKYHEALSRTHNSRLPLADSRQRNYAWETRQKYSPLSAEYDGYSSEASIDEGNCIQRMRRTPPLDELQPPPYQDDSGSPHLSCTPSEIGDSKCEFSHCSNSPRCSYNKCPSEGSTGHEIESFHNKGYEEDVPSDSTAVLSPEDMSAQGSSSQLPKPFDPEPEAKYGTLDVTFDYDSQEQKLLVTVTAVTDIPTYNRTGGNSWQVHLVLLPIKKQRAKTSIQRGPCPVFTETFKFNHVESEMIGNYAVRFRLYGVHRMKKEKIVGEKIFYLTKLNLQGKMSLPVILEPSYNHSGCDSQMSVSEMSCSESTSSCQSLEHGSVPEILIGLLYNATTGRLSAEVIKGSHFKNLAANRPPNTYVKLTLLNSMGQEMSKCKTSIRRGQPNPVYKETFVFQVALFQLSDVTLILSVYNKRSMKRKEMIGWISLGLNSSGEEELNHWTEMKESKGQQVCRWHALLES

SEQ ID NO: 36871 - protein, 265 aa, Homo sapiens
  REGION 1..265: note = ENSP00000445837
MLLLFLYINKKFCFENVGGFPDLGSEYSTRKNSQDKIYNSYMDKDEHGSSSESEDEALGKYHEALSRTHNSRLPLADSRQRNYAWETRQKYSPLSAEYDGYSSEASIDEGNCIQRMRRTPPLDELQPPPYQDDSGSPHLSCTPSEIGDSKCEFSHCSNSPRCSYNKCPSEGSTGHEIESFHNKGYEEDVPSDSTAVLSPEDMSAQGSSSQLPKPFDPEPEAKYGTLDVTFDYDSQEQKLLVTVTAVTDIPTYNRTGGNSWAVTPK

SEQ ID NO: 36872 - protein, 517 aa, Homo sapiens
  REGION 1..517: note = ENSP00000355982
MLLLFLYINKKFCFENVGGFPDLGSEYSTRKNSQDKIYNSYMDKDEHGSSSESEDEALGKYHEALSRTHNSRLPLADSRQRNYAWETRQKYSPLSAEYDGYSSEASIDEGNCIQRMRRTPPLDELQPPPYQDDSGSPHLSCTPSEIGDSKCEFSHCSNSPRCSYNKCPSEGSTGHEIESFHNKGYEEDVPSDSTAVLSPEDMSAQGSSSQLPKPFDPEPEAKYGTLDVTFDYDSQEQKLLVTVTAVTDIPTYNRTGGNSWQVHLVLLPIKKQRAKTSIQRGPCPVFTETFKFNHVESEMIGNYAVRFRLYGVHRMKKEKIVGEKIFYLTKLNLQGKMSLPVILEPSYNHSGCDSQMSVSEMSCSESTSSCQSLEHGSVPEILIGLLYNATTGRLSAEVIKGSHFKNLAANRPPNTYVKLTLLNSMGQEMSKCKTSIRRGQPNPVYKETFVFQVALFQLSDVTLILSVYNKRSMKRKEMIGWISLGLNSSGEEELNHWTEMKESKGQQVCRWHALLES

SEQ ID NO: 36873 - protein, 504 aa, Homo sapiens
  REGION 1..504: note = ENSP00000442891
  VARIANT 1: note = Any amino acid
XYMDKDEHGSSSESEDEALGKYHEALSRTHNSRLPLADSRQRNYAWETRQKYSPLSAEYDGYSSEASIDEGNCIQRMRRTPPLDELQPPPYQDDSGSPHLSCTPSEIGDSKCEFSHCSNSPRCSYNKCPSEGSTGHEIESFHNKGYEEDVPSDSTAVLSPEDMSAQGSSSQLPKPFDPEPEAKYGTLDVTFDYDSQEQKLLVTVTAVTDIPTYNRTGGNSWQVHLVLLPIKKQRAKTSIQRGPCPVFTETFKFNHVESEMIGNYAVRFRLYGVHRMKKEKIVGEKIFYLTKLNLQGKMSLPVILEPSYNHSGCDSQMSVSEMSCSESTSSCQSLEHGSVPEILIGLLYNATTGRLSAEVIKGSHFKNLAANRPPTFHPLLSDGLFCCLKHLIGGQVYIIRDTYVKLTLLNSMGQEMSKCKTSIRRGQPNPVYKETFVFQVALFQLSDVTLILSVYNKRSMKRKEMIGWISLGLNSSGEEELNHWTEMKESKGQQVCRWHALLES

SEQ ID NO: 36874 - protein, 619 aa, Homo sapiens
  REGION 1..619: note = ENSP00000486230
MASASWRLKVEREPVEYMNLSVLEKIGYFSVARLEYSGTILAHCNFRLLGSNDSSASASQVTGTTVSPEAVGFLSAVGVFIILMLLLFLYINKKFCFENVGGFPDLGSEYSTRKNSQDKIYNSYMDKDEHGSSSESEDEALGKYHEALSRTHNSRLPLADSRQRNYAWETRQKYSPLSAEYDGYSSEASIDEGNCIQRMRRTPPLDELQPPPYQDDSGSPHLSCTPSEIGDSKCEFSHCSNSPRCSYNKCPSEGSTGHEIESFHNKGYEEDVPSDSTAVLSPEDMSAQGSSSQLPKPFDPEPEAKYGTLDVTFDYDSQEQKLLVTVTAVTDIPTYNRTGGNSWQVHLVLLPIKKQRAKTSIQRGPCPVFTETFKFNHVESEMIGNYAVRFRLYGVHRMKKEKIVGEKIFYLTKLNLQGKMSLPVILEPSYNHSGCDSQMSVSEMSCSESTSSCQSLEHGSVPEILIGLLYNATTGRLSAEVIKGSHFKNLAANRPPNGLFCCLKHLIGGQVYIIRDTYVKLTLLNSMGQEMSKCKTSIRRGQPNPVYKETFVFQVALFQLSDVTLILSVYNKRSMKRKEMIGWISLGLNSSGEEELNHWTEMKESKGQQVCRWHALLES

SEQ ID NO: 36875 - protein, 517 aa, Homo sapiens; identical to SEQ ID NO: 36872
  REGION 1..517: note = ENSP00000437423

SEQ ID NO: 36876 - protein, 221 aa, Homo sapiens
  REGION 1..221: note = ENSP00000490266
MATDITPEAIGFLSAVGVFIVLLAVLFLFINKKLCFETIGGLPFLEHRGKRKHSKDKTGIHKGLVNSFGDDEELSTSSDSDEEVIKQFEISVSRSQSFRSVTSEKGKQTGLEQKPKFSRSLLTHGEDGTEVSACEDLDGASQRRYSENLSYGEDDHIPAHSQSPCERGDAKHHGTSHQESSVVQSLRRQSTEGSLEMETAFNSRGFEDSYATDSSSMWSPE

SEQ ID NO: 36877 - protein, 645 aa, Homo sapiens
  REGION 1..645: note = ENSP00000478637
MVLAMASQDVQNFFQPFSSWISRVYEALQQAGDMLSASLVNISKQDSKLSDKLDQDLDNIQIQETYFEDEEQDNDWSQEDANSLFLEVDHFSCCNSDLQDSAQNSSPSLSQHAKDSCSTMSQWPNWASDDRKLPHVLSSIAEEEHHLEKQRSGLQHGFDSQLPGTLETVNGKKQVNSFGDDEELSTSSDSDEEVIKQFEISVSRSQSFRSVTSEKGKQTGLEQKPKFSRSLLTHGEDGTEVSACEDLDGASQRRYSENLSYGEDDHIPAHSQSPCERGDAKHHGTSHQESSVVQSLRRQSTEGSLEMETAFNSRGFEDSYATDSSSMWSPEEQDRTNLQVPSGVSEPISKCGDLDVIFEYRAASQKLTVTIVRAQGLPDKDRSGVNSWQVHVVLLPGKKHRGRTNIQRGPNPVFREKVTFAKLEPRDVAACAVRFRLYAARKMTRERMMGEKLFYLSHLHPEGEMKVTLVLEPRSNISSGGSPLSPSAVSHSDSTSSTQSLSHGGAPELLVGLSYNATTGRLSVEMIKGSHFRNLAVNRAPDTYGKLFLLNSVGQEMSRCKTSIRRGQPNPVYKETFVFQVALFQLSDVTLMISVYNRRTMKRKEMIGWIALGQNSSGEEEQDHWEEMKETKGQQICRWHTLLES

SEQ ID NO: 36878 - protein, 383 aa, Homo sapiens
  REGION 1..383: note = ENSP00000451035
MVLAMASQDVQNFFQPFSSWISRVYEALQQAGDMLSASLVNISKQDSKLSDKLDQDLDNIQIQETYFEDEEQDNDWSQEDANSLFLEVDHFSCCNSDLQDSAQNSSPSLSQHAKDSCSTMSQWPNWASDDRKLPHVLSSIAEEEHHLEKQRSGLQHGFDSQLPGTLETVNGKKQVNSFGDDEELSTSSDSDEEVIKQFEISVSRSQSFRSVTSEKGKQTGLEQKPKFSRSLLTHGEDGTEVSACEDLDGASQRRYSENLSYGEDDHIPAHSQSPCERGDAKHHGTSHQESSVVQSLRRQSTEGSLEMETAFNSRGFEDSYATDSSSMWSPEANLNLKRKGYLLDVYCLSSPLLFTTSLHRRNRTGPICRCHPGSQSPSQSVVT

SEQ ID NO: 36879 - protein, 203 aa, Homo sapiens
  REGION 1..203: note = ENSP00000394700
MTRERMMGEKLFYLSHLHPEGEMKVTLVLEPRSNISSGGSPLSPSAVSHSDSTSSTQSLSHGGAPELLVGLSYNATTGRLSVEMIKGSHFRNLAVNRAPDTYGKLFLLNSVGQEMSRCKTSIRRGQPNPVYKETFVFQVALFQLSDVTLMISVYNRRTMKRKEMIGWIALGQNSSGEEEQDHWEEMKETKGQQICRWHTLLES

SEQ ID NO: 36880 - protein, 79 aa, Homo sapiens
  REGION 1..79: note = ENSP00000456790
MASRSSDKDGDSVHTASEVPLTPRTNSPDGRRSSSDTSKSTYSLTRRISSLESRRPSSPLIDIKPIEFGVLSAKKEPIQ

SEQ ID NO: 36881 - protein, 93 aa, Homo sapiens
  REGION 1..93: note = ENSP00000454335
MASRSSDKDGDSVHTASEVPLTPRTNSPDGRRSSSDTSKSTYSLTRRISSLESRRPSSPLIDIKPIEFGVLSAKKEPIQPSVLRRTYNPDDYF

SEQ ID NO: 36882 - protein, 474 aa, Homo sapiens
  REGION 1..474: note = ENSP00000347538
MAYIQLEPLNEGFLSRISGLLLCRWTCRHCCQKCYESSCCQSSEDEVEILGPFPAQTPPWLMASRSSDKDGDSVHTASEVPLTPRTNSPDGRRSSSDTSKSTYSLTRRISSLESRRPSSPLIDIKPIEFGVLSAKKEPIQPSVLRRTYNPDDYFRKFEPHLYSLDSNSDDVDSLTDEEILSKYQLGMLHFSTQYDLLHNHLTVRVIEARDLPPPISHDGSRQDMAHSNPYVKICLLPDQKNSKQTGVKRKTQKPVFEERYTFEIPFLEAQRRTLLLTVVDFDKFSRHCVIGKVSVPLCEVDLVKGGHWWKALIPSSQNEVELGELLLSLNYLPSAGRLNVDVIRAKQLLQTDVSQGSDPFVKIQLVHGLKLVKTKKTSFLRGTIDPFYNESFSFKVPQEELENASLVFTVFGHNMKSSNDFIGRIVIGQYSSGPSETNHWRRMLNTHRTAVEQWHSLRSRAECDRVSPASLEVT

SEQ ID NO: 36883 - protein, 392 aa, Homo sapiens
  REGION 1..392: note = ENSP00000456009
MASRSSDKDGDSVHTASEVPLTPRTNSPDGRRSSSDTSKSTYSLTRRISSLESRRPSSPLIDIKPIEFGVLSAKKEPIQPSVLRRTYNPDDYFRKFEPHLYSLDSNSDDVDSLTDEEILSKYQLGMLHFSTQYDLLHNHLTVRVIEARDLPPPISHDGSRQDMAHSNPYVKICLLPDQKNSKQTGVKRKTQKPVFEERYTFEIPFLEAQRRTLLLTVVDFDKFSRHCVIGKVSVPLCEVDLVKGGHWWKALIPSSQNEVELGELLLSLNYLPSAGRLNVDVIRAKQLLQTDVSQGSDPFVKIQLVHGLKLVKTKKTSFLRGTIDPFYNESFSFKVPQEELENASLVFTGSNSPIPACELSSHPAHGISPWIPSPGNEHFHGIKKQVKAIKVE

SEQ ID NO: 36884 - protein, 413 aa, Homo sapiens
  REGION 1..413: note = ENSP00000456252
MASRSSDKDGDSVHTASEVPLTPRTNSPDGRRSSSDTSKSTYSLTRRISSLESRRPSSPLIDIKPIEFGVLSAKKEPIQPSVLRRTYNPDDYFRKFEPHLYSLDSNSDDVDSLTDEEILSKYQLGMLHFSTQYDLLHNHLTVRVIEARDLPPPISHDGSRQDMAHSNPYVKICLLPDQKNSKQTGVKRKTQKPVFEERYTFEIPFLEAQRRTLLLTVVDFDKFSRHCVIGKVSVPLCEVDLVKGGHWWKALIPSSQNEVELGELLLSLNYLPSAGRLNVDVIRAKQLLQTDVSQGSDPFVKIQLVHGLKLVKTKKTSFLRGTIDPFYNESFSFKVPQEELENASLVFTVFGHNMKSSNDFIGRIVIGQYSSGPSETNHWRRMLNTHRTAVEQWHSLRSRAECDRVSPASLEVT

SEQ ID NO: 36885 - protein, 470 aa, Homo sapiens
  REGION 1..470: note = ENSP00000454721
MLEPLNEGFLSRISGLLLCRWTCRHCCQKCYESSCCQSSEDEVEILGPFPAQTPPWLMASRSSDKDGDSVHTASEVPLTPRTNSPDGRRSSSDTSKSTYSLTRRISSLESRRPSSPLIDIKPIEFGVLSAKKEPIQPSVLRRTYNPDDYFRKFEPHLYSLDSNSDDVDSLTDEEILSKYQLGMLHFSTQYDLLHNHLTVRVIEARDLPPPISHDGSRQDMAHSNPYVKICLLPDQKNSKQTGVKRKTQKPVFEERYTFEIPFLEAQRRTLLLTVVDFDKFSRHCVIGKVSVPLCEVDLVKGGHWWKALIPSSQNEVELGELLLSLNYLPSAGRLNVDVIRAKQLLQTDVSQGSDPFVKIQLVHGLKLVKTKKTSFLRGTIDPFYNESFSFKVPQEELENASLVFTVFGHNMKSSNDFIGRIVIGQYSSGPSETNHWRRMLNTHRTAVEQWHSLRSRAECDRVSPASLEVT

SEQ ID NO: 36886 - protein, 142 aa, Homo sapiens
  REGION 1..142: note = ENSP00000456879
  VARIANT 1: note = Any amino acid
XPDQKNSKQTGVKRKTQKPVFEERYTFEIPFLEAQRRTLLLTVVDFDKFSRHCVIGKVSVPLCEVDLVKGGHWWKALIPSSQNEVELGELLLSLNYLPSAGRLNVDVIRAKQLLQTDVSQGSAGAWTQTCENQEDVLLKGHN

SEQ ID NO: 36887 - protein, 168 aa, Homo sapiens
  REGION 1..168: note = ENSP00000456915
MGTFFAFMEKKNEVELGELLLSLNYLPSAGRLNVDVIRAKQLLQTDVSQGSDPFVKIQLVHGLKLVKTKKTSFLRGTIDPFYNESFSFKVPQEELENASLVFTVFGHNMKSSNDFIGRIVIGQYSSGPSETNHWRRMLNTHRTAVEQWHSLRSRAECDRVSPASLEVT

SEQ ID NO: 36888 - protein, 419 aa, Homo sapiens
  REGION 1..419: note = ENSP00000356236
MRNIFKRNQEPIVAPATTTATMPIGPVDNSTESGGAGESQEDMFAKLKEKLFNEINKIPLPPWALIAIAVVAGLLLLTCCFCICKKCCCKKKKNKKEKGKGMKNAMNMKDMKGGQDDDDAETGLTEGEGEGEEEKEPENLGKLQFSLDYDFQANQLTVGVLQAAELPALDMGGTSDPYVKVFLLPDKKKKYETKVHRKTLNPAFNETFTFKVPYQELGGKTLVMAIYDFDRFSKHDIIGEVKVPMNTVDLGQPIEEWRDLQGGEKEEPEKLGDICTSLRYVPTAGKLTVCILEAKNLKKMDVGGLSDPYVKIHLMQNGKRLKKKKTTVKKKTLNPYFNESFSFEIPFEQIQKVQVVVTVLDYDKLGKNEAIGKIFVGSNATGTELRHWSDMLANPRRPIAQWHSLKPEEEVDALLGKNK

SEQ ID NO: 36889 - protein, 419 aa, Homo sapiens; identical to SEQ ID NO: 36888
  REGION 1..419: note = ENSP00000356237

SEQ ID NO: 36890 - protein, 79 aa, Homo sapiens
  REGION 1..79: note = ENSP00000469834
GHNEVIGVCRVGPDAADPHGREHWAEMLANPRKPVEHWHQLVEVSRGPTPTPDKHPCTLGPFIHATNALHVRESQSQAS

SEQ ID NO: 36891 - protein, 590 aa, Homo sapiens
  REGION 1..590: note = ENSP00000340914
MSGDYEDDLCRRALILVSDLCARVRDADTNDRCQEFNDRIRGYPRGPDADISVSLLSVIVTFCGIVLLGVSLFVSWKLCWVPWRDKGGSAVGGGPLRKDLGPGVGLAGLVGGGGHHLAAGLGGHPLLGGPHHHAHAAHHPPFAELLEPGSLGGSDTPEPSYLDMDSYPEAAAAAVAAGVKPSQTSPELPSEGGAGSGLLLLPPSGGGLPSAQSHQQVTSLAPTTRYPALPRPLTQQTLTSQPDPSSEERPPALPLPLPGGEEKAKLIGQIKPELYQGTGPGGRRSGGGPGSGEAGTGAPCGRISFALRYLYGSDQLVVRILQALDLPAKDSNGFSDPYVKIYLLPDRKKKFQTKVHRKTLNPVFNETFQFSVPLAELAQRKLHFSVYDFDRFSRHDLIGQVVLDNLLELAEQPPDRPLWRDIVEGGSEKADLGELNFSLCYLPTAGRLTVTIIKASNLKAMDLTGFSDPYVKASLISEGRRLKKRKTSIKKNTLNPTYNEALVFDVAPESVENVGLSIAVVDYDCIGHNEVIGVCRVGPDAADPHGREHWAEMLANPRKPVEHWHQLVEEKTVTSFTKGSKGLSEKENSE

SEQ ID NO: 36892 - protein, 590 aa, Homo sapiens; identical to SEQ ID NO: 36891
  REGION 1..590: note = ENSP00000469398

SEQ ID NO: 36893 - protein, 590 aa, Homo sapiens; identical to SEQ ID NO: 36891
  REGION 1..590: note = ENSP00000468982

SEQ ID NO: 36894 - protein, 96 aa, Homo sapiens
  REGION 1..96: note = ENSP00000469637
MSGDYEDDLCRRALILVSDLCARVRDADTNDRCQEFNDRIRGYPRGPDADISVSLLSVIVTFCGIVLLGVSLFVSWKLCWVPWRDKGGSAVGGGPL

SEQ ID NO: 36895 - protein, 425 aa, Homo sapiens
  REGION 1..425: note = ENSP00000255224
MAPITTSREEFDEIPTVVGIFSAFGLVFTVSLFAWICCQRKSSKSNKTPPYKFVHVLKGVDIYPENLNSKKKFGADDKNEVKNKPAVPKNSLHLDLEKRDLNGNFPKTNLKPGSPSDLENATPKLFLEGEKESVSPESLKSSTSLTSEEKQEKLGTLFFSLEYNFERKAFVVNIKEARGLPAMDEQSMTSDPYIKMTILPEKKHKVKTRVLRKTLDPAFDETFTFYGIPYTQIQELALHFTILSFDRFSRDDIIGEVLIPLSGIELSEGKMLMNREIIKRNVRKSSGRGELLISLCYQSTTNTLTVVVLKARHLPKSDVSGLSDPYVKVNLYHAKKRISKKKTHVKKCTPNAVFNELFVFDIPCEGLEDISVEFLVLDSERGSRNEVIGQLVLGAAAEGTGGEHWKEICDYPRRQIAKWHVLCDG

SEQ ID NO: 36896 - protein, 407 aa, Homo sapiens
  REGION 1..407: note = ENSP00000466930
MAPITTSREEFVSLFAWICCQRKSSKSNKTPPYKFVHVLKGVDIYPENLNSKKKFGADDKNEVKNKPAVPKNSLHLDLEKRDLNGNFPKTNLKPGSPSDLENATPKLFLEGEKESVSPESLKSSTSLTSEEKQEKLGTLFFSLEYNFERKAFVVNIKEARGLPAMDEQSMTSDPYIKMTILPEKKHKVKTRVLRKTLDPAFDETFTFYGIPYTQIQELALHFTILSFDRFSRDDIIGEVLIPLSGIELSEGKMLMNREIIKRNVRKSSGRGELLISLCYQSTTNTLTVVVLKARHLPKSDVSGLSDPYVKVNLYHAKKRISKKKTHVKKCTPNAVFNELFVFDIPCEGLEDISVEFLVLDSERGSRNEVIGQLVLGAAAEGTGGEHWKEICDYPRRQIAKWHVLCDG

SEQ ID NO: 36897 - protein, 103 aa, Homo sapiens
  REGION 1..103: note = ENSP00000470516
MLMNREIIKRNVRKSSGRGELLISLCYQSTTNTLTVVVLKARHLPKSDVSGLSDPYVKVNLYHAKKRISKKKTHVKKCTPNAVFNELFVFDIPCEGLEDISVE

SEQ ID NO: 36898 - protein, 143 aa, Homo sapiens
  REGION 1..143: note = ENSP00000472583
MKSPQWWGSSVHLAWSSQSLSLHGSAVRENHPMKTRVLRKTLDPAFDETFTFYGIPYTQIQELALHFTILSFDRFSRDDIIGEVLIPLSGIELSEGKMLMNREIIKRNVRKSSGRGELLISLCYQSTTNTLTVVVLKARHLPK

SEQ ID NO: 36899 - protein, 403 aa, Homo sapiens
  REGION 1..403: note = ENSP00000263846
MYRDPEAASPGAPSRDVLLVSAIITVSLSVTVVLCGLCHWCQRKLGKRYKNSLETVGTPDSGRGRSEKKAIKLPAGGKAVNTAPVPGQTPHDESDRRTEPRSSVSDLVNSLTSEMLMLSPGSEEDEAHEGCSRENLGRIQFSVGYNFQESTLTVKIMKAQELPAKDFSGTSDPFVKIYLLPDKKHKLETKVKRKNLNPHWNETFLFEGFPYEKVVQRILYLQVLDYDRFSRNDPIGEVSIPLNKVDLTQMQTFWKDLKPCSDGSGSRGELLLSLCYNPSANSIIVNIIKARNLKAMDIGGTSDPYVKVWLMYKDKRVEKKKTVTMKRNLNPIFNESFAFDIPTEKLRETTIIITVMDKDKLSRNDVIGKIYLSWKSGPGEVKHWKDMIARPRQPVAQWHQLKA

SEQ ID NO: 36900 - protein, 478 aa, Homo sapiens
  REGION 1..478: note = ENSP00000444201
MYRDPEAASPGAPSRDVLLVSAIITVSLSVTVVLCGLCHWCQRKLGKRYKNSLETVGTPDSGRGRSEKKAINGTLLSGAKVAAAAGLAVEREGRLGEKPAPVPPPGEDALRSGGAAPSEPGSGGKAGRGRWRTVQSHLAAGKLNLSKLPAGGKAVNTAPVPGQTPHDESDRRTEPRSSVSDLVNSLTSEMLMLSPGSEEDEAHEGCSRENLGRIQFSVGYNFQESTLTVKIMKAQELPAKDFSGTSDPFVKIYLLPDKKHKLETKVKRKNLNPHWNETFLFEGFPYEKVVQRILYLQVLDYDRFSRNDPIGEVSIPLNKVDLTQMQTFWKDLKPCSDGSGSRGELLLSLCYNPSANSIIVNIIKARNLKAMDIGGTSDPYVKVWLMYKDKRVEKKKTVTMKRNLNPIFNESFAFDIPTEKLRETTIIITVMDKDKLSRNDVIGKIYLSWKSGPGEVKHWKDMIARPRQPVAQWHQLKA

SEQ ID NO: 36901 - protein, 122 aa, Homo sapiens
  REGION 1..122: note = ENSP00000438171
MYRDPEAASPGAPSRDVLLVSAIITVSLSVTVVLCGLCHWCQRKLGKRYKNSLETVGTPDSGRGRSEKKAINDLDRDFWNNNESTVQQKWSSYPPKEFILNISPYAPYGDPRLSLNPLFLRR

SEQ ID NO: 36902 - protein, 122 aa, Homo sapiens; identical to SEQ ID NO: 36901
  REGION 1..122: note = ENSP00000441184

SEQ ID NO: 36903 - protein, 686 aa, Homo sapiens
  REGION 1..686: note = ENSP00000439694
MYRDPEAASPGAPSRDVLLVSAIITVSLSVTVVLCGLCHWCQRKLGKRYKNSLETVGTPDSGRGRSEKKAINDLDRDFWNNNESTVQQKWSSYPPKEFILNISPYAPYGDPRLSLNGTLLSGAKVAAAAGLAVEREGRLGEKPAPVPPPGEDALRSGGAAPSEPGSGGKAGRGRWRTVQSHLAAGKLNLSNFEDSTLSTATTLESIPSSTGEPKCQRPRTLMRQQSLQQPLSQHQRGRQPSQPTTSQSLGQLQAHMASAPGPNPRAYGRGQARQGTSAGSKYRAAGGRSRSNPGSWDHVVGQIRNRGLDMKSFLEGRMVVLSLVLGLSEQDDFANIPDLQNPGTQQNQNAQGDKRLPAGGKAVNTAPVPGQTPHDESDRRTEPRSSVSDLVNSLTSEMLMLSPGSEEDEAHEGCSRENLGRIQFSVGYNFQESTLTVKIMKAQELPAKDFSGTSDPFVKIYLLPDKKHKLETKVKRKNLNPHWNETFLFEGFPYEKVVQRILYLQVLDYDRFSRNDPIGEVSIPLNKVDLTQMQTFWKDLKPCSDGSGSRGELLLSLCYNPSANSIIVNIIKARNLKAMDIGGTSDPYVKVWLMYKDKRVEKKKTVTMKRNLNPIFNESFAFDIPTEKLRETTIIITVMDKDKLSRNDVIGKIYLSWKSGPGEVKHWKDMIARPRQPVAQWHQLKA

SEQ ID NO: 36904 - protein, 447 aa, Homo sapiens
  REGION 1..447: note = ENSP00000444568
MYRDPEAASPGAPSRDVLLVSAIITVSLSVTVVLCGLCHWCQRKLGKRYKNSLETVGTPDSGRGRSEKKAINDLDRDFWNNNESTVQQKWSSYPPKEFILNISPYAPYGDPRLSLKLPAGGKAVNTAPVPGQTPHDESDRRTEPRSSVSDLVNSLTSEMLMLSPGSEEDEAHEGCSRENLGRIQFSVGYNFQESTLTVKIMKAQELPAKDFSGTSDPFVKIYLLPDKKHKLETKVKRKNLNPHWNETFLFEGFPYEKVVQRILYLQVLDYDRFSRNDPIGEVSIPLNKVDLTQMQTFWKDLKPCSDGSGSRGELLLSLCYNPSANSIIVNIIKARNLKAMDIGGTSDPYVKVWLMYKDKRVEKKKTVTMKRNLNPIFNESFAFDIPTEKLRETTIIITVMDKDKLSRNDVIGKIYLSWKSGPGEVKHWKDMIARPRQPVAQWHQLKA

SEQ ID NO: 36905 - protein, 611 aa, Homo sapiens
  REGION 1..611: note = ENSP00000444019
MYRDPEAASPGAPSRDVLLVSAIITVSLSVTVVLCGLCHWCQRKLGKRYKNSLETVGTPDSGRGRSEKKAINDLDRDFWNNNESTVQQKWSSYPPKEFILNISPYAPYGDPRLSLNFEDSTLSTATTLESIPSSTGEPKCQRPRTLMRQQSLQQPLSQHQRGRQPSQPTTSQSLGQLQAHMASAPGPNPRAYGRGQARQGTSAGSKYRAAGGRSRSNPGSWDHVVGQIRNRGLDMKSFLEGRMVVLSLVLGLSEQDDFANIPDLQNPGTQQNQNAQGDKRLPAGGKAVNTAPVPGQTPHDESDRRTEPRSSVSDLVNSLTSEMLMLSPGSEEDEAHEGCSRENLGRIQFSVGYNFQESTLTVKIMKAQELPAKDFSGTSDPFVKIYLLPDKKHKLETKVKRKNLNPHWNETFLFEGFPYEKVVQRILYLQVLDYDRFSRNDPIGEVSIPLNKVDLTQMQTFWKDLKPCSDGSGSRGELLLSLCYNPSANSIIVNIIKARNLKAMDIGGTSDPYVKVWLMYKDKRVEKKKTVTMKRNLNPIFNESFAFDIPTEKLRETTIIITVMDKDKLSRNDVIGKIYLSWKSGPGEVKHWKDMIARPRQPVAQWHQLKA

SEQ ID NO: 36906 - protein, 522 aa, Homo sapiens
  REGION 1..522: note = ENSP00000437720
MYRDPEAASPGAPSRDVLLVSAIITVSLSVTVVLCGLCHWCQRKLGKRYKNSLETVGTPDSGRGRSEKKAINDLDRDFWNNNESTVQQKWSSYPPKEFILNISPYAPYGDPRLSLNGTLLSGAKVAAAAGLAVEREGRLGEKPAPVPPPGEDALRSGGAAPSEPGSGGKAGRGRWRTVQSHLAAGKLNLSKLPAGGKAVNTAPVPGQTPHDESDRRTEPRSSVSDLVNSLTSEMLMLSPGSEEDEAHEGCSRENLGRIQFSVGYNFQESTLTVKIMKAQELPAKDFSGTSDPFVKIYLLPDKKHKLETKVKRKNLNPHWNETFLFEGFPYEKVVQRILYLQVLDYDRFSRNDPIGEVSIPLNKVDLTQMQTFWKDLKPCSDGSGSRGELLLSLCYNPSANSIIVNIIKARNLKAMDIGGTSDPYVKVWLMYKDKRVEKKKTVTMKRNLNPIFNESFAFDIPTEKLRETTIIITVMDKDKLSRNDVIGKIYLSWKSGPGEVKHWKDMIARPRQPVAQWHQLKA

SEQ ID NO: 36907 - protein, 175 aa, Homo sapiens
  REGION 1..175: note = ENSP00000443576
MYRDPEAASPGAPSRDVLLVSAIITVSLSVTVVLCGLCHWCQRKLGKRYKNSLETVGTPDSGRGRSEKKAIKLPAGGKAVNTAPVPGQTPHDESDRRTEPRSSVSDLVNSLTSEMLMLSPGSEEDEAHEGCSRENLGRIQFSVGYNFQESTLTVKIMKAQELPAKDFSGTSDPFV

SEQ ID NO: 36908 - protein, 1861 aa, Homo sapiens
  REGION 1..1861: note = ENSP00000263635
MLKAVLKKSREGGKGGKKEAGSDFGPETSPVLHLDHSADSPVSSLPTAEDTYRVSLAKGVSMSLPSSPLLPRQSHLVQSRVNKKSPGPVRKPKYVESPRVPGDAVIMPFREVAKPTEPDEHEAKADNEPSCSPAAQELLTRLGFLLGEGIPSATHITIEDKNETMCTALSQGISPCSTLTSSTASPSTDSPCSTLNSCVSKTAANKSPCETISSPSSTLESKDSGIIATITSSSENDDRSGSSLEWNKDGNLRLGVQKGVLHDRRADNCSPVAEEETTGSAESTLPKAESSAGDGPVPYSQGSSSLIMPRPNSVAATSSTKLEDLSYLDGQRNAPLRTSIRLPWHNTAGGRAQEVKARFAPYKPQDILLKPLLFEVPSITTDSVFVGRDWLFHQIEENLRNTELAENRGAVVVGNVGFGKTAIISKLVALSCHGSRMRQIASNSPGSSPKTSDPTQDLHFTPLLSPSSSTSASSTAKTPLGSISAENQRPREDAVKYLASKVVAYHYCQADNTYTCLVPEFVHSIAALLCRSHQLAAYRDLLIKEPQLQSMLSLRSCVQDPVAAFKRGVLEPLTNLRNEQKIPEEEYIILIDGLNEAEFHKPDYGDTLSSFITKIISKFPAWLKLIVTVRANFQEIISALPFVKLSLDDFPDNKDIHSDLHAYVQHRVHSSQDILSNISLNGKADATLIGKVSSHLVLRSLGSYLYLKLTLDLFQRGHLVIKSASYKVVPVSLSELYLLQCNMKFMTQSAFERALPILNVALASLHPMTDEQIFQAINAGHIQGEQGWEDFQQRMDALSCFLIKRRDKTRMFCHPSFREWLVWRADGENTAFLCEPRNGHALLAFMFSRQEGKLNRQQTMELGHHILKAHIFKGLSKKTGISSSHLQALWIGYSTEGLSAALASLRNLYTPNVKVSRLLILGGANVNYRTEVLNNAPILCVQSHLGHEEVVTLLLEFGACLDGTSENGMTALCYAAAAGHMKLVCLLTKKGVRVDHLDKKGQCALVHSALRGHGDILQYLLTCEWSPGPPQPGTLRKSHALQQALTAAASMGHSSVVQCLLGMEKEHEVEVNGTDTLWGETALTAAAGRGKLEVCELLLGHGAAVSRTNRRGVPPLFCAARQGHWQIVRLLLERGCDVNLSDKQGRTPLMVAACEGHLSTVEFLLSKGAALSSLDKEGLSALSWACLKGHRAVVQYLVEEGAAIDQTDKNGRTPLDLAAFYGDAETVLYLVEKGAVIEHVDHSGMRPLDRAIGCRNTSVVVALLRKGAKLGNAAWAMATSKPDILIILLQKLMEEGNVMYKKGKMKEAAQRYQYALRKFPREGFGEDMRPFNELRVSLYLNLSRCRRKTNDFGMAEEFASKALELKPKSYEAFYARARAKRNSRQFVAALADLQEAVKLCPTNQEVKRLLARVEEECKQLQRSQQQKQQGPLPAPLNDSENEEDTPTPGLSDHFHSEETEEEETSPQEESVSPTPRSQPSSSVPSSYIRNLQEGLQSKGRPVSPQSRAGIGKSLREPVAQPGLLLQPSKQAQIVKTSQHLGSGQSAVRNGSMKVQISSQNPPPSPMPGRIAATPAGSRTQHLEGTGTFTTRAGCGHFGDRLGPSQNVRLQCGENGPAHPLPSKTKTTERLLSHSSVAVDAAPPNQGGLATCSDVRHPASLTSSGSSGSPSSSIKMSSSTSSLTSSSSFSDGFKVQGPDTRIKDKVVTHVQSGTAEHRPRNTPFMGIMDKTARFQQQSNPPSRSWHCPAPEGLLTNTSSAAGLQSANTEKPSLMQVGGYNNQAKTCSVSTLSASVHNGAQVKELEESKCQIPVHSQENRITKTVSHLYQESISKQQPHISNEAHRSHLTAAKPKRSFIESNV

SEQ ID NO: 36909 - protein, 1235 aa, Homo sapiens
  REGION 1..1235: note = ENSP00000310094
MPAGGRAGSLKDPDVAELFFKDDPEKLFSDLREIGHGSFGAVYFARDVRNSEVVAIKKMSYSGKQSNEKWQDIIKEVRFLQKLRHPNTIQYRGCYLREHTAWLVMEYCLGSASDLLEVHKKPLQEVEIAAVTHGALQGLAYLHSHNMIHRDVKAGNILLSEPGLVKLGDFGSASIMAPANSFVGTPYWMAPEVILAMDEGQYDGKVDVWSLGITCIELAERKPPLFNMNAMSALYHIAQNESPVLQSGHWSEYFRNFVDSCLQKIPQDRPTSEVLLKHRFVLRERPPTVIMDLIQRTKDAVRELDNLQYRKMKKILFQEAPNGPGAEAPEEEEEAEPYMHRAGTLTSLESSHSVPSMSISASSQSSSVNSLADASDNEEEEEEEEEEEEEEEGPEAREMAMMQEGEHTVTSHSSIIHRLPGSDNLYDDPYQPEITPSPLQPPAAPAPTSTTSSARRRAYCRNRDHFATIRTASLVSRQIQEHEQDSALREQLSGYKRMRRQHQKQLLALESRLRGEREEHSARLQRELEAQRAGFGAEAEKLARRHQAIGEKEARAAQAEERKFQQHILGQQKKELAALLEAQKRTYKLRKEQLKEELQENPSTPKREKAEWLLRQKEQLQQCQAEEEAGLLRRQRQYFELQCRQYKRKMLLARHSLDQDLLREDLNKKQTQKDLECALLLRQHEATRELELRQLQAVQRTRAELTRLQHQTELGNQLEYNKRREQELRQKHAAQVRQQPKSLKVRAGQRPPGLPLPIPGALGPPNTGTPIEQQPCSPGQEAVLDQRMLGEEEEAVGERRILGKEGATLEPKQQRILGEESGAPSPSPQKHGSLVDEEVWGLPEEIEELRVPSLVPQERSIVGQEEAGTWSLWGKEDESLLDEEFELGWVQGPALTPVPEEEEEEEEGAPIGTPRDPGDGCPSPDIPPEPPPTHLRPCPASQLPGLLSHGLLAGLSFAVGSSSGLLPLLLLLLLPLLAAQGGGGLQAALLALEVGLVGLGASYLLLCTALHLPSSLFLLLAQGTALGAVLGLSWRRGLMGVPLGLGAAWLLAWPGLALPLVAMAAGGRWVRQQGPRVRRGISRLWLRVLLRLSPMAFRALQGCGAVGDRGLFALYPKTNKDGFRSRLPVPGPRRRNPRTTQHPLALLARVWVLCKGWNWRLARASQGLASHLPPWAIHTLASWGLLRGERPTRIPRLLPRSQRQLGPPASRQPLPGTLAGRRSRTRQSRALPPWR

SEQ ID NO: 36910 - protein, 1122 aa, Homo sapiens
  REGION 1..1122: note = ENSP00000440336
MPAGGRAGSLKDPDVAELFFKDDPEKLFSDLREIGHGSFGAVYFARDVRNSEVVAIKKMSYSGKQSNEKWQDIIKEVRFLQKLRHPNTIQYRGCYLREHTAWLVMEYCLGSASDLLEVHKKPLQEVEIAAVTHGALQGLAYLHSHNMIHRDVKAGNILLSEPGLVKLGDFGSASIMAPANSFVGTPYWMAPEVILAMDEGQYDGKVDVWSLGITCIELAERKPPLFNMNAMSALYHIAQNESPVLQSGHWSEYFRNFVDSCLQKIPQDRPTSEVLLKHRFVLRERPPTVIMDLIQRTKDAVRELDNLQYRKMKKILFQEAPNGPGAEAPEEEEEAEPYMHRAGTLTSLESSHSVPSMSISASSQSSSVNSLADASDNEEEEEEEEEEEEEEEGPEAREMAMMQEGEHTVTSHSSIIHRLPGSDNLYDDPYQPEITPSPLQPPAAPAPTSTTSSARRRAYCRNRDHFATIRTASLVSRQIQEHEQDSALREQLSGYKRMRRQHQKQLLALESRLRGEREEHSARLQRELEAQRAGFGAEAEKLARRHQAIGEKEARAAQAEERKFQQHILGQQKKELAALLEAQKRTYKLRKEQLKEELQENPSTPKREKAEWLLRQKEQLQQCQAEEEAGLLRRQRQYFELQCRQYKRKMLLARHSLDQDLLREDLNKKQTQKDLECALLLRQHEATRELELRQLQAVQRTRAELTRLQHQTELGNQLEYNKRREQELRQKHAAQVRQQPKSLKERSIVGQEEAGTWSLWGKEDESLLDEEFELGWVQGPALTPVPEEEEEEEEGAPIGTPRDPGDGCPSPDIPPEPPPTHLRPCPASQLPGLLSHGLLAGLSFAVGSSSGLLPLLLLLLLPLLAAQGGGGLQAALLALEVGLVGLGASYLLLCTALHLPSSLFLLLAQGTALGAVLGLSWRRGLMGVPLGLGAAWLLAWPGLALPLVAMAAGGRWVRQQGPRVRRGISRLWLRVLLRLSPMAFRALQGCGAVGDRGLFALYPKTNKDGFRSRLPVPGPRRRNPRTTQHPLALLARVWVLCKGWNWRLARASQGLASHLPPWAIHTLASWGLLRGERPTRIPRLLPRSQRQLGPPASRQPLPGTLAGRRSRTRQSRALPPWR

SEQ ID NO: 36911 - protein, 1049 aa, Homo sapiens
  REGION 1..1049: note = ENSP00000279394
MPAGGRAGSLKDPDVAELFFKDDPEKLFSDLREIGHGSFGAVYFARDVRNSEVVAIKKMSYSGKQSNEKWQDIIKEVRFLQKLRHPNTIQYRGCYLREHTAWLVMEYCLGSASDLLEVHKKPLQEVEIAAVTHGALQGLAYLHSHNMIHRDVKAGNILLSEPGLVKLGDFGSASIMAPANSFVGTPYWMAPEVILAMDEGQYDGKVDVWSLGITCIELAERKPPLFNMNAMSALYHIAQNESPVLQSGHWSEYFRNFVDSCLQKIPQDRPTSEVLLKHRFVLRERPPTVIMDLIQRTKDAVRELDNLQYRKMKKILFQEAPNGPGAEAPEEEEEAEPYMHRAGTLTSLESSHSVPSMSISASSQSSSVNSLADASDNEEEEEEEEEEEEEEEGPEAREMAMMQEGEHTVTSHSSIIHRLPGSDNLYDDPYQPEITPSPLQPPAAPAPTSTTSSARRRAYCRNRDHFATIRTASLVSRQIQEHEQDSALREQLSGYKRMRRQHQKQLLALESRLRGEREEHSARLQRELEAQRAGFGAEAEKLARRHQAIGEKEARAAQAEERKFQQHILGQQKKELAALLEAQKRTYKLRKEQLKEELQENPSTPKREKAEWLLRQKEQLQQCQAEEEAGLLRRQRQYFELQCRQYKRKMLLARHSLDQDLLREDLNKKQTQKDLECALLLRQHEATRELELRQLQAVQRTRAELTRLQHQTELGNQLEYNKRREQELRQKHAAQVRQQPKSLKSKELQIKKQFQETCKIQTRQYKALRAHLLETTPKAQHKSLLKRLKEEQTRKLAILAEQYDQSISEMLSSQALRLDETQEAEFQALRQQLQQELELLNAYQSKIKIRTESQHERELRELEQRVALRRALLEQRVEEELLALQTGRSERIRSLLERQAREIEAFDAESMRLGFSSMALGGIPAEAAAQGYPAPPPAPAWPSRPVPRSGAHWSHGPPPPGMPPPAWRQPSLLAPPGPPNWLGPPTQSGTPRGGALLLLRNSPQPLRRAASGGSGSENVGPPAAAVPGPLSRSTSVASHILNGSSHFYS

SEQ ID NO: 36912 - protein, 1062 aa, Homo sapiens
  REGION 1..1062: note = ENSP00000393048
MMGTSQGHVARKSRNWGLNPSRLSSIPLSSTPCHLSPSSLSPFSVAERKPPLFNMNAMSALYHIAQNESPVLQSGHWSEYFRNFVDSCLQKIPQDRPTSEVLLKHRFVLRERPPTVIMDLIQRTKDAVRELDNLQYRKMKKILFQEAPNGPGAEAPEEEEEAEPYMHRAGTLTSLESSHSVPSMSISASSQSSSVNSLADASDNEEEEEEEEEEEEEEEGPEAREMAMMQEGEHTVTSHSSIIHRLPGSDNLYDDPYQPEITPSPLQPPAAPAPTSTTSSARRRAYCRNRDHFATIRTASLVSRQIQEHEQDSALREQLSGYKRMRRQHQKQLLALESRLRGEREEHSARLQRELEAQRAGFGAEAEKLARRHQAIGEKEARAAQAEERKFQQHILGQQKKELAALLEAQKRTYKLRKEQLKEELQENPSTPKREKAEWLLRQKEQLQQCQAEEEAGLLRRQRQYFELQCRQYKRKMLLARHSLDQDLLREDLNKKQTQKDLECALLLRQHEATRELELRQLQAVQRTRAELTRLQHQTELGNQLEYNKRREQELRQKHAAQVRQQPKSLKVRAGQRPPGLPLPIPGALGPPNTGTPIEQQPCSPGQEAVLDQRMLGEEEEAVGERRILGKEGATLEPKQQRILGEESGAPSPSPQKHGSLVDEEVWGLPEEIEELRVPSLVPQERSIVGQEEAGTWSLWGKEDESLLDEEFELGWVQGPALTPVPEEEEEEEEGAPIGTPRDPGDGCPSPDIPPEPPPTHLRPCPASQLPGLLSHGLLAGLSFAVGSSSGLLPLLLLLLLPLLAAQGGGGLQAALLALEVGLVGLGASYLLLCTALHLPSSLFLLLAQGTALGAVLGLSWRRGLMGVPLGLGAAWLLAWPGLALPLVAMAAGGRWVRQQGPRVRRGISRLWLRVLLRLSPMAFRALQGCGAVGDRGLFALYPKTNKDGFRSRLPVPGPRRRNPRTTQHPLALLARVWVLCKGWNWRLARASQGLASHLPPWAIHTLASWGLLRGERPTRIPRLLPRSQRQLGPPASRQPLPGTLAGRRSRTRQSRALPPWR

SEQ ID NO: 36913 - protein, 898 aa, Homo sapiens
  REGION 1..898: note = ENSP00000416374
MRKGVLKDPEIADLFYKDDPEELFIGLHEIGHGSFGAVYFATNAHTSEVVAIKKMSYSGKQTHEKWQDILKEVKFLRQLKHPNTIEYKGCYLKEHTAWLVMEYCLGSASDLLEVHKKPLQEVEIAAITHGALHGLAYLHSHALIHRDIKAGNILLTEPGQVKLADFGSASMASPANSFVGTPYWMAPEVILAMDEGQYDGKVDIWSLGITCIELAERKPPLFNMNAMSALYHIAQNDSPTLQSNEWTDSFRRFVDYCLQKIPQERPTSAELLRHDFVRRDRPLRVLIDLIQRTKDAVRELDNLQYRKMKKILFQETRNGPLNESQEDEEDSEHGTSLNREMDSLGSNHSIPSMSVSTGSQSSSVNSMQEVMDESSSELVMMHDDESTINSSSSVVHKKDHVFIRDEAGHGDPRPEPRPTQSVQSQALHYRNRERFATIKSASLVTRQIHEHEQENELREQMSGYKRMRRQHQKQLIALENKLKAEMDEHRLKLQKEVETHANNSSIELEKLAKKQVAIIEKEAKVAAADEKKFQQQILAQQKKDLTTFLESQKKQYKICKEKIKEEMNEDHSTPKKEKQERISKHKENLQHTQAEEEAHLLTQQRLYYDKNCRFFKRKIMIKRHEVEQQNIREELNKKRTQKEMEHAMLIRHDESTRELEYRQLHTLQKLRMDLIRLQHQTELENQLEYNKRRERELHRKHVMELRQQPKNLKAMEMQIKKQFQDTCKVQTKQYKALKNHQLEVTPKNEHKTILKTLKDEQTRKLAILAEQYEQSINEMMASQALRLDEAQEAECQALRLQLQQEMELLNAYQSKIKMQTEAQHERELQKLEQRVSLRRAHLEQKIEEELAALQKERSERIKNLLERQEREIETFDMESLRMGFGNLVTLDFPKEDYR

SEQ ID NO: 36914 - protein, 898 aa, Homo sapiens; identical to SEQ ID NO: 36913
  REGION 1..898: note = ENSP00000376317

SEQ ID NO: 36915 - protein, 93 aa, Homo sapiens
  REGION 1..93: note = ENSP00000441932
MELLNAYQSKIKMQTEAQHERELQKLEQRVSLRRAHLEQKIEEELAALQKERSERIKNLLERQEREIETFDMESLRMGFGNLVTLDFPKEDYR

SEQ ID NO: 36916 - protein, 438 aa, Homo sapiens
  REGION 1..438: note = ENSP00000443834
MSGYKRMRRQHQKQLIALENKLKAEMDEHRLKLQKEVETHANNSSIELEKLAKKQVAIIEKEAKVAAADEKKFQQQILAQQKKDLTTFLESQKKQYKICKEKIKEEMNEDHSTPKKEKQERISKHKENLQHTQAEEEAHLLTQQRLYYDKNCRFFKRKIMIKRHEVEQQNIREELNKKRTQKEMEHAMLIRHDESTRELEYRQLHTLQKLRMDLIRLQHQTELENQLEYNKRRERELHRKHVMELRQQPKNLKAMEMQIKKQFQDTCKVQTKQYKALKNHQLEVTPKNEHKTILKTLKDEQTRKLAILAEQYEQSINEMMASQALRLDEAQEAECQALRLQLQQEMELLNAYQSKIKMQTEAQHERELQKLEQRVSLRRAHLEQKIEEELAALQKERSERIKNLLERQEREIETFDMESLRMGFGNLVTLDFPKEDYR

SEQ ID NO: 36917 - protein, 38 aa, Homo sapiens
  REGION 1..38: note = ENSP00000443487
MSGYKRMRRQHQKQLIALENKLKAEMDEHRLKLQKEVE

SEQ ID NO: 36918 - protein, 14 aa, Homo sapiens
  REGION 1..14: note = ENSP00000439620
MSGYKRMRRQHQKQ

SEQ ID NO: 36919 - protein, 185 aa, Homo sapiens
  REGION 1..185: note = ENSP00000437389
QRLLLERTHCLVHKKPLQEVEIAAITHGALHGLAYLHSHALIHRDIKAGNILLTEPGQVKLADFGSASMASPANSFVGTPYWMAPEVILAMDEGQYDGKVDIWSLGITCIELAERKPPLFNMNAMSALYHIAQNDSPTLQSNEWTDSFRRFVDYCLQKIPQERPTSAELLRHDFVRRDRPLRVLI

SEQ ID NO: 36920 - protein, 136 aa, Homo sapiens
  REGION 1..136: note = ENSP00000443465
MRKGVLKDPEIADLFYKDDPEELFIGLHEIGHGSFGAVYFATNAHTSEVVAIKKMSYSGKQTHEKWQDILKEVKFLRQLKHPNTIEYKGCYLKEHTAWLVMEYCLGSASDLLEVHKKPLQEVEIAAITHGALHGLA

SEQ ID NO: 36921 - protein, 93 aa, Homo sapiens
  REGION 1..93: note = ENSP00000438820
MRKGVLKDPEIADLFYKDDPEELFIGLHEIGHGSFGAVYFATNAHTSEVVAIKKMSYSGKQTHEKWQDILKEVKFLRQLKHPNTIEYKGCYLK

SEQ ID NO: 36922 - protein, 61 aa, Homo sapiens
  REGION 1..61: note = ENSP00000444057
MRKGVLKDPEIADLFYKDDPEELFIGLHEIGHGSFGAVYFATNAHTSEVVAIKKMSYSGKQ

SEQ ID NO: 36923 - protein, 57 aa, Homo sapiens
  REGION 1..57: note = ENSP00000440315
MRKGVLKDPEIADLFYKDDPEELFIGLHEIGHGSFGAVYFATNAHTSEVVAIKKMSY

SEQ ID NO: 36924 - protein, 36 aa, Homo sapiens
  REGION 1..36: note = ENSP00000441071
MRKGVLKDPEIADLFYKDDPEELFIGLHEIGHGSFG

SEQ ID NO: 36925 - protein, 21 aa, Homo sapiens
  REGION 1..21: note = ENSP00000442541
MRKGVLKDPEIADLFYKDDPE

SEQ ID NO: 36926 - protein, 18 aa, Homo sapiens
  REGION 1..18: note = ENSP00000438766
MRKGVLKDPEIADLFYKD

SEQ ID NO: 36927 - protein, 1159 aa, Homo sapiens
  REGION 1..1159: note = ENSP00000423651
MEPITFTARKHLLSNEVSVDFGLQLVGSLPVHSLTTMPMLPWVVAEVRRLSRQSTRKEPVTKQVRLCVSPSGLRCEPEPGRSQQWDPLIYSSIFECKPQRVHKLIHNSHDPSYFACLIKEDAVHRQSICYVFKADDQTKVPEIISSIRQAGKIARQEELHCPSEFDDTFSKKFEVLFCGRVTVAHKKAPPALIDECIEKFNHVSGSRGSESPRPNPPHAAPTGSQEPVRRPMRKSFSQPGLRSLAFRKELQDGGLRSSGFFSSFEESDIENHLISGHNIVQPTDIEENRTMLFTIGQSEVYLISPDTKKIALEKNFKEISFCSQGIRHVDHFGFICRESSGGGGFHFVCYVFQCTNEALVDEIMMTLKQAFTVAAVQQTAKAPAQLCEGCPLQSLHKLCERIEGMNSSKTKLELQKHLTTLTNQEQATIFEEVQKLRPRNEQRENELIISFLRCLYEEKQKEHIHIGEMKQTSQMAAENIGSELPPSATRFRLDMLKNKAKRSLTESLESILSRGNKARGLQEHSISVDLDSSLSSTLSNTSKEPSVCEKEALPISESSFKLLGSSEDLSSDSESHLPEEPAPLSPQQAFRRRANTLSHFPIECQEPPQPARGSPGVSQRKLMRYHSVSTETPHERNVDPSPVGESKHRPGQSSAPAPPPRLNPSASSPNFFKYLKHNSSGEQSGNAVPKSISYRNALRKKLHSSSSVPNFLKFLAPVDENNTSDFMNTKRDFESKANHLGDSGGTPVKTRRHSWRQQIFLRVATPQKACDSSSRYEDYSELGELPPRSPLEPVCEDGPFGPPPEEKKRTSRELRELWQKAILQQILLLRMEKENQKLQASENDLLNKRLKLDYEEITPCLKEVTTVWEKMLSTPGRSKIKFDMEKMHSAVGQGVPRHHRGEIWKFLAEQFHLKHQFPSKQQPKDVPYKELLKQLTSQQHAILIDLGRTFPTHPYFSAQLGAGQLSLYNILKAYSLLDQEVGYCQGLSFVAGILLLHMSEEEAFKMLKFLMFDMGLRKQYRPDMIILQMEKTINQVFEMDIAKQLQAYEVEYHVLQEELIDSSPLSDNQRMDKLEKTNSSLRKQNLDLLEQLQVANGRIQSLEATIEKLLSSESKLKQAMLTLELERSALLQTVEELRRRSAEPSDREPECTQPEPTGD

SEQ ID NO: 36928 - protein, 1168 aa, Homo sapiens
  REGION 1..1168: note = ENSP00000261439
MEPITFTARKHLLSNEVSVDFGLQLVGSLPVHSLTTMPMLPWVVAEVRRLSRQSTRKEPVTKQVRLCVSPSGLRCEPEPGRSQQWDPLIYSSIFECKPQRVHKLIHNSHDPSYFACLIKEDAVHRQSICYVFKADDQTKVPEIISSIRQAGKIARQEELHCPSEFDDTFSKKFEVLFCGRVTVAHKKAPPALIDECIEKFNHVSGSRGSESPRPNPPHAAPTGSQEPVRRPMRKSFSQPGLRSLAFRKELQDGGLRSSGFFSSFEESDIENHLISGHNIVQPTDIEENRTMLFTIGQSEVYLISPDTKKIALEKNFKEISFCSQGIRHVDHFGFICRESSGGGGFHFVCYVFQCTNEALVDEIMMTLKQAFTVAAVQQTAKAPAQLCEGCPLQSLHKLCERIEGMNSSKTKLELQKHLTTLTNQEQATIFEEVQKLRPRNEQRENELIISFLRCLYEEKQKEHIHIGEMKQTSQMAAENIGSELPPSATRFRLDMLKNKAKRSLTESLESILSRGNKARGLQEHSISVDLDSSLSSTLSNTSKEPSVCEKEALPISESSFKLLGSSEDLSSDSESHLPEEPAPLSPQQAFRRRANTLSHFPIECQEPPQPARGSPGVSQRKLMRYHSVSTETPHERKDFESKANHLGDSGGTPVKTRRHSWRQQIFLRVATPQKACDSSSRYEDYSELGELPPRSPLEPVCEDGPFGPPPEEKKRTSRELRELWQKAILQQILLLRMEKENQKLQASENDLLNKRLKLDYEEITPCLKEVTTVWEKMLSTPGRSKIKFDMEKMHSAVGQGVPRHHRGEIWKFLAEQFHLKHQFPSKQQPKDVPYKELLKQLTSQQHAILIDLGRTFPTHPYFSAQLGAGQLSLYNILKAYSLLDQEVGYCQGLSFVAGILLLHMSEEEAFKMLKFLMFDMGLRKQYRPDMIILQIQMYQLSRLLHDYHRDLYNHLEEHEIGPSLYAAPWFLTMFASQFPLGFVARVFDMIFLQGTEVIFKVALSLLGSHKPLILQHENLETIVDFIKSTLPNLGLVQMEKTINQVFEMDIAKQLQAYEVEYHVLQEELIDSSPLSDNQRMDKLEKTNSSLRKQNLDLLEQLQVANGRIQSLEATIEKLLSSESKLKQAMLTLELERSALLQTVEELRRRSAEPSDREPECTQPEPTGD

SEQ ID NO: 36929 - protein, 144 aa, Homo sapiens
  REGION 1..144: note = ENSP00000383994
MEPITFTARKHLLSNEVSVDFGLQLVGSLPVHSLTTMPMLPWVVAEVRRLSRQSTRKEPVTKQVRLCVSPSGLRCEPEPGRSQQWDPLIYSSIFECKPQRVHKLIHNSHDPSYFACLIKEDAVHRQSICYVFKADDQTKCSSSL

SEQ ID NO: 36930 - protein, 599 aa, Homo sapiens
  REGION 1..599: note = ENSP00000396877
MSPLFSWVAKVPEIISSIRQAGKIARQEELHCPSEFDDTFSKKFEVLFCGRVTVAHKKAPPALIDECIEKFNHVSGSRGSESPRPNPPHAAPTGSQEPVRRPMRKSFSQPGLRSLAFRKELQDGGLRSSGFFSSFEESDIENHLISGHNIVQPTDIEENRTMLFTIGQSEVYLISPDTKKIALEKNFKEISFCSQGIRHVDHFGFICRESSGGGGFHFVCYVFQCTNEALVDEIMMTLKQAFTVAAVQQTAKAPAQLCEGCPLQSLHKLCERIEGMNSSKTKLELQKHLTTLTNQEQATIFEEVQKLRPRNEQRENELIISFLRCLYEEKQKEHIHIGEMKQTSQMAAENIGSELPPSATRFRLDMLKNKAKRSLTESLESILSRGNKARGLQEHSISVDLDSSLSSTLSNTSKEPSVCEKEALPISESSFKLLGSSEDLSSDSESHLPEEPAPLSPQQAFRRRANTLSHFPIECQEPPQPARGSPGVSQRKLMRYHSVSTETPHERKDFESKANHLGDSGGTPVKTRRHSWRQQIFLRVATPQKACDSSSRYEDYSELGELPPRSPLEPVCEDGPFGPPPEEKKRTSRELRELWQKAI

SEQ ID NO: 36931 - protein, 856 aa, Homo sapiens
  REGION 1..856: note = ENSP00000421641
  VARIANT 1: note = Any amino acid
XCTNEALVDEIMMTLKQAFTVAAVQQTAKAPAQLCEGCPLQSLHKLCERIEGMNSSKTKLELQKHLTTLTNQEQATIFEEVQKLRPRNEQRENELIISFLRCLYEEKQKEHIHIGEMKQTSQMAAENIGSELPPSATRFRLDMLKNKAKRSLTESLESILSRGNKARGLQEHSISVDLDSSLSSTLSNTSKEPSVCEKEALPISESSFKLLGSSEDLSSDSESHLPEEPAPLSPQQAFRRRANTLSHFPIECQEPPQPARGSPGVSQRKLMRYHSVSTETPHERNISYRNALRKKLHSSSSVPNFLKFLAPVDENNTSDFMNTKRDFESKANHLGDSGGTPVKTRRHSWRQQIFLRVATPQKACDSSSRYEDYSELGELPPRSPLEPVCEDGPFGPPPEEKKRTSRELRELWQKAILQQILLLRMEKENQKLQASENDLLNKRLKLDYEEITPCLKEVTTVWEKMLSTPGRSKIKFDMEKMHSAVGQGVPRHHRGEIWKFLAEQFHLKHQFPSKQQPKDVPYKELLKQLTSQQHAILIDLGRTFPTHPYFSAQLGAGQLSLYNILKAYSLLDQEVGYCQGLSFVAGILLLHMSEEEAFKMLKFLMFDMGLRKQYRPDMIILQIQMYQLSRLLHDYHRDLYNHLEEHEIGPSLYAAPWFLTMFASQFPLGFVARVFDMIFLQGTEVIFKVALSLLGSHKPLILQHENLETIVDFIKSTLPNLGLVQMEKTINQVFEMDIAKQLQAYEVEYHVLQEELIDSSPLSDNQRMDKLEKTNSSLRKQNLDLLEQLQVANGRIQSLEATIEKLLSSESKLKQAMLTLELERSALLQTVEELRRRSAEPSDREPECTQPEPTGD

SEQ ID NO: 36932 - protein, 177 aa, Homo sapiens
  REGION 1..177: note = ENSP00000425655
  VARIANT 1: note = Any amino acid
XMNSSKTKLELQKHLTTLTNQEQATIFEEVQKLRPRNEQRENELIISFLRCLYEEKQKEHIHIGEMKQEPSVCEKEALPISESSFKLLGSSEDLSSDSESHLPEEPAPLSPQQAFRRRANTLSHFPIECQEPPQPARGSPGVSQRKLMRYHSVSTETPHERKDFESKANHLGDSGGT

SEQ ID NO: 36933 - protein, 252 aa, Homo sapiens
  REGION 1..252: note = ENSP00000397640
  VARIANT 1: note = Any amino acid
XSILSRGNKARGLQEHSISVDLDSSLSSTLSNTSKEPSVCEKEALPISESSFKLLGSSEDLSSDSESHLPEEPAPLSPQQAFRRRANTLSHFPIECQEPPQPARGSPGVSQRKLMRYHSVSTETPHERNVDPSPVGESKHRPGQSSAPAPPPRLNPSASSPNFFKYLKHNSSGEQSGNAVPKRDFESKANHLGDSGGTPVKTRRHSWRQQIFLRVATPQKACDSSSRYEDYSELGELPPRSPLEPVCEDGPF

SEQ ID NO: 36934 - protein, 226 aa, Homo sapiens
  REGION 1..226: note = ENSP00000410167
SLSSTLSNTSKEPSVCEKEALPISESSFKLLGSSEDLSSDSESHLPEEPAPLSPQQAFRRRANTLSHFPIECQEPPQPARGSPGVSQRKLMRYHSVSTETPHERKDFESKANHLGDSGGTPVKTRRHSWRQQIFLRVATPQKACDSSSRYEEPHCGSPSLACTEDYSELGELPPRSPLEPVCEDGPFGPPPEEKKRTSRELRELWQKAILQQILLLRMEKENQKLQ

SEQ ID NO: 36935 - protein, 432 aa, Homo sapiens
  REGION 1..432: note = ENSP00000478039
MEKENQKLQASENDLLNKRLKLDYEEITPCLKEVTTVWEKMLSTPGRSKIKFDMEKMHSAVGQGVPRHHRGEIWKFLAEQFHLKHQFPSKQQPKDVPYKELLKQLTSQQHAILIDLGRTFPTHPYFSAQLGAGQLSLYNILKAYSLLDQEVGYCQGLSFVAGILLLHMSEEEAFKMLKFLMFDMGLRKQYRPDMIILQIQMYQLSRLLHDYHRDLYNHLEEHEIGPSLYAAPWFLTMFASQFPLGFVARVFDMIFLQGTEVIFKVALSLLGSHKPLILQHENLETIVDFIKSTLPNLGLVQMEKTINQVFEMDIAKQLQAYEVEYHVLQEELIDSSPLSDNQRMDKLEKTNSSLRKQNLDLLEQLQVANGRIQSLEATIEKLLSSESKLKQAMLTLELERSALLQTVEELRRRSAEPSDREPECTQPEPTGD

SEQ ID NO: 36936 - protein, 1298 aa, Homo sapiens
  REGION 1..1298: note = ENSP00000366863
MEPPSCIQDEPFPHPLEPEPGVSAQPGPGKPSDKRFRLWYVGGSCLDHRTTLPMLPWLMAEIRRRSQKPEAGGCGAPAAREVILVLSAPFLRCVPAPGAGASGGTSPSATQPNPAVFIFEHKAQHISRFIHNSHDLTYFAYLIKAQPDDPESQMACHVFRATDPSQVPDVISSIRQLSKAAMKEDAKPSKDNEDAFYNSQKFEVLYCGKVTVTHKKAPSSLIDDCMEKFSLHEQQRLKIQGEQRGPDPGEDLADLEVVVPGSPGDCLPEEADGTDTHLGLPAGASQPALTSSRVCFPERILEDSGFDEQQEFRSRCSSVTGVQRRVHEGSQKSQPRRRHASAPSHVQPSDSEKNRTMLFQVGRFEINLISPDTKSVVLEKNFKDISSCSQGIKHVDHFGFICRESPEPGLSQYICYVFQCASESLVDEVMLTLKQAFSTAAALQSAKTQIKLCEACPMHSLHKLCERIEGLYPPRAKLVIQRHLSSLTDNEQADIFERVQKMKPVSDQEENELVILHLRQLCEAKQKTHVHIGEGPSTISNSTIPENATSSGRFKLDILKNKAKRSLTSSLENIFSRGANRMRGRLGSVDSFERSNSLASEKDYSPGDSPPGTPPASPPSSAWQTFPEEDSDSPQFRRRAHTFSHPPSSTKRKLNLQDGRAQGVRSPLLRQSSSEQCSNLSSVRRMYKESNSSSSLPSLHTSFSAPSFTAPSFLKSFYQNSGRLSPQYENEIRQDTASESSDGEGRKRTSSTCSNESLSVGGTSVTPRRISWRQRIFLRVASPMNKSPSAMQQQDGLDRNELLPLSPLSPTMEEEPLVVFLSGEDDPEKIEERKKSKELRSLWRKAIHQQILLLRMEKENQKLEASRDELQSRKVKLDYEEVGACQKEVLITWDKKLLNCRAKIRCDMEDIHTLLKEGVPKSRRGEIWQFLALQYRLRHRLPNKQQPPDISYKELLKQLTAQQHAILVDLGRTFPTHPYFSVQLGPGQLSLFNLLKAYSLLDKEVGYCQGISFVAGVLLLHMSEEQAFEMLKFLMYDLGFRKQYRPDMMSLQIQMYQLSRLLHDYHRDLYNHLEENEISPSLYAAPWFLTLFASQFSLGFVARVFDIIFLQGTEVIFKVALSLLSSQETLIMECESFENIVEFLKNTLPDMNTSEMEKIITQVFEMDISKQLHAYEVEYHVLQDELQESSYSCEDSETLEKLERANSQLKRQNMDLLEKLQVAHTKIQALESNLENLLTRETKMKSLIRTLEQEKMAYQKTVEQLRKLLPADALVNCDLLLRDLNCNPNNKAKIGNKP

SEQ ID NO: 36937 - protein, 282 aa, Homo sapiens
  REGION 1..282: note = ENSP00000396932
DNEQADIFERVQKMKPVSDQEENELVILHLRQLCEAKQKTHVHIGEGPSTISNSTIPENATSSGRFKLDILKNKAKRSLTSSLENIFSRGANRMRGRLGSVDSFERSNSLASEKDYSPGDSPPGTPPASPPSSAWQTFPEEDSDSPQFRRRAHTFSHPPSSTKRKLNLQDGRAQGVRSPLLRQSSSEQCSDGEGRKRTSSTCSNESLSVGGTSVTPRRISWRQRIFLRVASPMNKSPSAMQQQDGLDRNELLPLSPLSPTMEEEPLVVFLSGEDDPEKIEER

SEQ ID NO: 36938 - protein, 1235 aa, Homo sapiens
  REGION 1..1235: note = ENSP00000366852
MEPPSCIQDEPFPHPLEPEPGVSAQPGPGKPSDKRFRLWYVGGSCLDHRTTLPMLPWLMAEIRRRSQKPEAGGCGAPAAREVILVLSAPFLRCVPAPGAGASGGTSPSATQPNPAVFIFEHKAQHISRFIHNSHDLTYFAYLIKAQPDDPESQMACHVFRATDPSQVPDVISSIRQLSKAAMKEDAKPSKDNEDAFYNSQKFEVLYCGKVTVTHKKAPSSLIDDCMEKFSLHEQQRLKIQGEQRGPDPGEDLADLEVVVPGSPGDCLPEEADGTDTHLGLPAGASQPALTSSRVCFPERILEDSGFDEQQEFRSRCSSVTGVQRRVHEGSQKSQPRRRHASAPSHVQPSDSEKNRTMLFQVGRFEINLISPDTKSVVLEKNFKDISSCSQGIKHVDHFGFICRESPEPGLSQYICYVFQCASESLVDEVMLTLKQAFSTAAALQSAKTQIKLCEACPMHSLHKLCERIEGLYPPRAKLVIQRHLSSLTDNEQADIFERVQKMKPVSDQEENELVILHLRQLCEAKQKTHVHIGEGPSTISNSTIPENATSSGRFKLDILKNKAKRSLTSSLENIFSRGANRMRGRLGSVDSFERSNSLASEKDYSPGDSPPGTPPASPPSSAWQTFPEEDSDSPQFRRRAHTFSHPPSSTKRKLNLQDGRAQGVRSPLLRQSSSEQCSDGEGRKRTSSTCSNESLSVGGTSVTPRRISWRQRIFLRVASPMNKSPSAMQQQDGLDRNELLPLSPLSPTMEEEPLVVFLSGEDDPEKIEERKKSKELRSLWRKAIHQQILLLRMEKENQKLEASRDELQSRKVKLDYEEVGACQKEVLITWDKKLLNCRAKIRCDMEDIHTLLKEGVPKSRRGEIWQFLALQYRLRHRLPNKQQPPDISYKELLKQLTAQQHAILVDLGRTFPTHPYFSVQLGPGQLSLFNLLKAYSLLDKEVGYCQGISFVAGVLLLHMSEEQAFEMLKFLMYDLGFRKQYRPDMMSLQIQMYQLSRLLHDYHRDLYNHLEENEISPSLYAAPWFLTLFASQFSLGFVARVFDIIFLQGTEVIFKVALSLLSSQETLIMECESFENIVEFLKNTLPDMNTSEMEKIITQVFEMDISKQLHAYEVEYHVLQDELQESSYSCEDSETLEKLERANSQLKRQNMDLLEKLQVAHTKIQALESNLENLLTRETKMKSLIRTLEQEKMAYQKTVEQLRKLLPADALVNCDLLLRDLNCNPNNKAKIGNKP

SEQ ID NO: 36939 - protein, 1290 aa, Homo sapiens
  REGION 1..1290: note = ENSP00000395986
MEPPSCIQDEPFPHPLEPEPGVSAQPGPGKPSDKRFRLWYVGGSCLDHRTTLPMLPWLMAEIRRRSQKPEAGGCGAPAAREVILVLSAPFLRCVPAPGAGASGGTSPSATQPNPAVFIFEHKAQHISRFIHNSHDLTYFAYLIKAQPDDPESQMACHVFRATDPSQVPDVISSIRQLSKAAMKEDAKPSKDNEDAFYNSQKFEVLYCGKVTVTHKKAPSSLIDDCMEKFSLHEQQRLKIQGEQRGPDPGEDLADLEVVVPGSPGDCLPEEADGTDTHLGLPAGASQPALTSSRVCFPERILEDSGFDEQQEFRSRCSSVTGVQRRVHEGSQKSQPRRRHASAPSHVQPSDSEKNRTMLFQVGRFEINLISPDTKSVVLEKNFKDISSCSQGIKHVDHFGFICRESPEPGLSQYICYVFQCASESLVDEVMLTLKQAFSTAAALQSAKTQIKLCEACPMHSLHKLCERIEGLYPPRAKLVIQRHLSSLTDNEQADIFERVQKMKPVSDQEENELVILHLRQLCEAKQKTHVHIGEGPSTISNSTIPENATSSGRFKLDILKNKAKRSLTSSLENIFSRGANRMRGRLGSVDSFERSNSLASEKDYSPGDSPPGTPPASPPSSAWQTFPEEDSDSPQFRRRAHTFSHPPSSTKRKLNLQDGRAQGVRSPLLRQSSSEQCSNLSSVRRMYKESNSSSSLPSLHTSFSAPSFTAPSFLKSFYQNSGRLSPQYENEISDGEGRKRTSSTCSNESLSVGGTSVTPRRISWRQRIFLRVASPMNKSPSAMQQQDGLDRNELLPLSPLSPTMEEEPLVVFLSGEDDPEKIEERKKSKELRSLWRKAIHQQILLLRMEKENQKLEASRDELQSRKVKLDYEEVGACQKEVLITWDKKLLNCRAKIRCDMEDIHTLLKEGVPKSRRGEIWQFLALQYRLRHRLPNKQQPPDISYKELLKQLTAQQHAILVDLGRTFPTHPYFSVQLGPGQLSLFNLLKAYSLLDKEVGYCQGISFVAGVLLLHMSEEQAFEMLKFLMYDLGFRKQYRPDMMSLQIQMYQLSRLLHDYHRDLYNHLEENEISPSLYAAPWFLTLFASQFSLGFVARVFDIIFLQGTEVIFKVALSLLSSQETLIMECESFENIVEFLKNTLPDMNTSEMEKIITQVFEMDISKQLHAYEVEYHVLQDELQESSYSCEDSETLEKLERANSQLKRQNMDLLEKLQVAHTKIQALESNLENLLTRETKMKSLIRTLEQEKMAYQKTVEQLRKLLPADALVNCDLLLRDLNCNPNNKAKIGNKP

SEQ ID NO: 36940 - protein, 795 aa, Homo sapiens
  REGION 1..795: note = ENSP00000253692
MYHSLSETRHPLQPEEQEVGIDPLSSYSNKSGGDSNKNGRRTSSTLDSEGTFNSYRKEWEELFVNNNYLATIRQKGINGQLRSSRFRSICWKLFLCVLPQDKSQWISRIEELRAWYSNIKEIHITNPRKVVGQQDLMINNPLSQDEGSLWNKFFQDKELRSMIEQDVKRTFPEMQFFQQENVRKILTDVLFCYARENEQLLYKQGMHELLAPIVFVLHCDHQAFLHASESAQPSEEMKTVLNPEYLEHDAYAVFSQLMETAEPWFSTFEHDGQKGKETLMTPIPFARPQDLGPTIAIVTKVNQIQDHLLKKHDIELYMHLNRLEIAPQIYGLRWVRLLFGREFPLQDLLVVWDALFADGLSLGLVDYIFVAMLLYIRDALISSNYQTCLGLLMHYPFIGDVHSLILKALFLRDPKRNPRPVTYQFHPNLDYYKARGADLMNKSRTNAKGAPLNINKVSNSLINFGRKLISPAMAPGSAGGPVPGGNSSSSSSVVIPTRTSAEAPSHHLQQQQQQQRLMKSESMPVQLNKGLSSKNISSSPSVESLPGGREFTGSPPSSATKKDSFFSNISRSRSHSKTMGRKESEEELEAQISFLQGQLNDLDAMCKYCAKVMDTHLVNIQDVILQENLEKEDQILVSLAGLKQIKDILKGSLRFNQSQLEAEENEQITIADNHYCSSGQGQGRGQGQSVQMSGAIKQASSETPGCTDRGNSDDFILISKDDDGSSARGSFSGQAQPLRTLRSTSGKSQAPVCSPLVFSDPLMGPASASSSNPSSSPDDDSSKDSGFTIVSPLDI

SEQ ID NO: 36941 - protein, 795 aa, Homo sapiens; identical to SEQ ID NO: 36940
  REGION 1..795: note = ENSP00000398127

SEQ ID NO: 36942 - protein, 817 aa, Homo sapiens
  REGION 1..817: note = ENSP00000402935
MYHSLSETRHPLQPEEQEVGIDPLSSYSNKSGGDSNKNGRRTSSTLDSEGTFNSYRKEWEELFVNNNYLATIRQKGINGQLRSSRFRSICWKLFLCVLPQDKSQWISRIEELRAWYSNIKEIHITNPRKVVGQQDLMINNPLSQDEGSLWNKFFQDKELRSMIEQDVKRTFPEMQFFQQENVRKILTDVLFCYARENEQLLYKQGMHELLAPIVFVLHCDHQAFLHASESAQPSEEMKTVLNPEYLEHDAYAVFSQLMETAEPWFSTFEHDGQKGKETLMTPIPFARPQDLGPTIAIVTKVNQIQDHLLKKHDIELYMHLNRLEIAPQIYGLRWVRLLFGREFPLQDLLVVWDALFADGLSLGLVDYIFVAMLLYIRDALISSNYQTCLGLLMHYPFIGDVHSLILKALFLRDPKRNPRPVTYQFHPNLDYYKARGADLMNKSRTNAKGAPLNINKVSNSLINFGRKLISPAMAPGSAGGPVPGGNSSSSSSVVIPTRTSAEAPSHHLQQQQQQQRLMKSESMPVQLNKGDVVTGSDAQVSVPVQTLTDLQGLSSKNISSSPSVESLPGGREFTGSPPSSATKKDSFFSNISRSRSHSKTMGRKESEEELEAQISFLQGQLNDLDAMCKYCAKVMDTHLVNIQDVILQENLEKEDQILVSLAGLKQIKDILKGSLRFNQSQLEAEENEQITIADNHYCSSGQGQGRGQGQSVQMSGAIKQASSETPGCTDRGNSDDFILISKDDDGSSARGSFSGQAQPLRTLRSTSGKSQAPVCSPLVFSDPLMGPASASSSNPSSSPDDDSSKDSGFTIVSPLDI

SEQ ID NO: 36943 - protein, 593 aa, Homo sapiens
  REGION 1..593: note = ENSP00000411925
MLWFLSYRKEWEELFVNNNYLATIRQKGINGQLRSSRFRSICWKLFLCVLPQDKSQWISRIEELRAWYSNIKEIHITNPRKVVGQQDLMINNPLSQDEGSLWNKFFQDKELRSMIEQDVKRTFPEMQFFQQENVRKILTDVLFCYARENEQLLYKQGMHELLAPIVFVLHCDHQAFLHASESAQPSEEMKTVLNPEYLEHDAYAVFSQLMETAEPWFSTFEHDGQKGKETLMTPIPFARPQDLGPTIAIVTKVNQIQDHLLKKHDIELYMHLNRLEIAPQIYGLRWVRLLFGREFPLQDLLVVWDALFADGLSLGLVDYIFVAMLLYIRDALISSNYQTCLGLLMHYPFIGDVHSLILKALFLRDPKRNPRPVTYQFHPNLDYYKARGADLMNKSRTNAKGAPLNINKVSNSLINFGRKLISPAMAPGSAGGPVPGGNSSSSSSVVIPTRTSAEAPSHHLQQQQQQQRLMKSESMPVQLNKGDVVTGSDAQVSVPVQTLTDLQGLSSKNISSSPSVESLPGGREFTGSPPSSATKKDSFFSNISRSRSHSKTMGRKESEEELEAQISFLQGQLNDLDAMCKYCAKVMDTHLGK

SEQ ID NO: 36944 - protein, 183 aa, Homo sapiens
  REGION 1..183: note = ENSP00000396239
MYHSLSETRHPLQPEEQEVGIDPLSSYSNKSGGDSNKNGRRTSSTLDSEGTFNSYRKEWEELFVNNNYLATIRQKGINGQLRSSRFRSICWKLFLCVLPQDKSQWISRIEELRAWYSNIKEIHITNPRKVVGQQDLMINNPLSQDEGSLWNKFFQDKELRSMIEQDVKRTFPEMQFFQQENVR

SEQ ID NO: 36945 - protein, 40 aa, Homo sapiens
  REGION 1..40: note = ENSP00000405886
MYHSLSETRHPLQPEEQEVGIDPLSSYSNKSGGKNGKNYL

SEQ ID NO: 36946 - protein, 40 aa, Homo sapiens; identical to SEQ ID NO: 36945
  REGION 1..40: note = ENSP00000414250

SEQ ID NO: 36947 - protein, 142 aa, Homo sapiens
  REGION 1..142: note = ENSP00000387395
MYHSLSETRHPLQPEEQEVGIDPLSSYSNKSGGDSNKNGRRTSSTLDSEGTFNSYRKEWEELFVNNNYLATIRQKGINGQLRSSRFRSICWKLFLCVLPQDKSQWISRIEELRAWYSNIKEIHITNPRKVVGQQDLMINNPL

SEQ ID NO: 36948 - protein, 140 aa, Homo sapiens
  REGION 1..140: note = ENSP00000399967
MYHSLSETRHPLQPEEQEVGIDPLSSYSNKSGGDSNKNGRRTSSTLDSEGTFNSYRKEWEELFVNNNYLATIRQKGINGQLRSSRFRSICWKLFLCVLPQDKSQWISRIEELRAWYSNIKEIHITNPRKVVGQQDLMINN

SEQ ID NO: 36949 - protein, 40 aa, Homo sapiens; identical to SEQ ID NO: 36945
  REGION 1..40: note = ENSP00000411780

SEQ ID NO: 36950 - protein, 129 aa, Homo sapiens
  REGION 1..129: note = ENSP00000410596
MYHSLSETRHPLQPEEQEVGIDPLSSYSNKSGGDSNKNGRRTSSTLDSEGTFNSYRKEWEELFVNNNYLATIRQKGINGQLRSSRFRSICWKLFLCVLPQDKSQWISRIEELRAWYSNIKEIHITNPRK

SEQ ID NO: 36951 - protein, 110 aa, Homo sapiens
  REGION 1..110: note = ENSP00000393882
MYHSLSETRHPLQPEEQEVGIDPLSSYSNKSGGDSNKNGRRTSSTLDSEGTFNSYRKEWEELFVNNNYLATIRQKGINGQLRSSRFRSICWKLFLCVLPQDKSQWISRIE

SEQ ID NO: 36952 - protein, 88 aa, Homo sapiens
  REGION 1..88: note = ENSP00000424998
MYHSLSETRHPLQPEEQEVGIDPLSSYSNKSGGDSNKNGRRTSSTLDSEGTFNSYRKEWEELFVNNNYLATIRQKGINGQLRSSRFRS

SEQ ID NO: 36953 - protein, 79 aa, Homo sapiens
  REGION 1..79: note = ENSP00000415379
MYHSLSETRHPLQPEEQEVGIDPLSSYSNKSGGDSNKNGRRTSSTLDSEGTFNSYRKEWEELFVNNNYLATIRQKGING

SEQ ID NO: 36954 - protein, 74 aa, Homo sapiens
  REGION 1..74: note = ENSP00000414159
MYHSLSETRHPLQPEEQEVGIDPLSSYSNKSGGDSNKNGRRTSSTLDSEGTFNSYRKEWEELFVNNNYLATIRQ

SEQ ID NO: 36955 - protein, 32 aa, Homo sapiens
  REGION 1..32: note = ENSP00000396850
MYHSLSETRHPLQPEEQEVGIDPLSSYSNKSG

SEQ ID NO: 36956 - protein, 30 aa, Homo sapiens
  REGION 1..30: note = ENSP00000408603
MYHSLSETRHPLQPEEQEVGIDPLSSYSNK

SEQ ID NO: 36957 - protein, 424 aa, Homo sapiens
  REGION 1..424: note = ENSP00000437184
MDQPSGRSFMQVLCEKYSPENFPYRRGPGMGVHVPATPQGSPMKDRLNLPSVLVLNSCGITCAGDEKEIAAFCAHVSELDLSDNKLEDWHEVSKIVSNVPQLEFLNLSSNPLNLSVLERTCAGSFSGVRKLVLNNSKASWETVHMILQELPDLEELFLCLNDYETVSCPSICCHSLKLLHITDNNLQDWTEIRKLGVMFPSLDTLVLANNHLNAIEEPDDSLARLFPNLRSISLHKSGLQSWEDIDKLNSFPKLEEVRLLGIPLLQPYTTEERRKLVIARLPSVSKLNGSVVTDGEREDSERFFIRYYVDVPQEEVPFRYHELITKYGKLEPLAEVDLRPQSSAKVEVHFNDQVEEMSIRLDQTVAELKKQLKTLVQLPTSNMLLYYFDHEAPFGPEEMKYSSRALHSFGIRDGDKIYVESKTK

SEQ ID NO: 36958 - protein, 118 aa, Homo sapiens
  REGION 1..118: note = ENSP00000284259
MDQPSGRSFMQVLCEKYSPENFPYRRGPGMGVHVPATPQGSPMKDRLNLPSVLVLNSCGITCAGDEKEIAAFCAHVSELDLSDNKLEDWHEKEHVLGPSLGFANLSSTTAKLLGRRST

SEQ ID NO: 36959 - protein, 83 aa, Homo sapiens
  REGION 1..83: note = ENSP00000431803
MDQPSGRSFMQVLCEKYSPENFPYRRGPGMGVHVPATPQGSPMKDRLNLPSVLVLNSCGITCAGDEKEIAAFCAHVSELDLSD

SEQ ID NO: 36960 - protein, 101 aa, Homo sapiens
  REGION 1..101: note = ENSP00000433365
MDQPSGRSFMQVLCEKYSPENFPYRRGPGMGVHVPATPQGSPMKDRLNLPSVLVLNSCGITCAGDEKEIAAFCAHVSELDLSDNKLEDWHEVCSPGKTLIN

SEQ ID NO: 36961 - protein, 424 aa, Homo sapiens; identical to SEQ ID NO: 36957
  REGION 1..424: note = ENSP00000403925

SEQ ID NO: 36962 - protein, 118 aa, Homo sapiens; identical to SEQ ID NO: 36958
  REGION 1..118: note = ENSP00000431156

SEQ ID NO: 36963 - protein, 238 aa, Homo sapiens
  REGION 1..238: note = ENSP00000432783
MDQPSGRSFMQVLCEKYSPENFPYRRGPGMGVHVPATPQGSPMKDRLNLPSVLVLNSCGITCAGDEKEIAAFCAHVSELDLSDNKLEDWHEVSKIVSNVPQLEFLNLSSNPLNLSVLERTCAGSFSGVRKLVLNNSKASWETVHMILQELPDLEELFLCLNDYETVSCPSICCHSLKLLHITDNNLQDWTEIRKLGVMFPSLDTLVLANNHLNAIEEPDDSLARLFPNLRSISLHKSG

SEQ ID NO: 36964 - protein, 109 aa, Homo sapiens
  REGION 1..109: note = ENSP00000436419
MGKKGLQSWEDIDKLNSFPKLEEVRLLGIPLLQPYTTEERRKLVIARLPSVSKLNGSVVTDGEREDSERFFIRYYVDVPQEEVPFRYHELITKYGKLEPLAEVDLRPQS

SEQ ID NO: 36965 - protein, 59 aa, Homo sapiens
  REGION 1..59: note = ENSP00000402923
MTELAGASSSCCHRPAGRGAMQSVLHHFQRLRGREGGSHFINTSSPRGEAKMSITSDEV

SEQ ID NO: 36966 - protein, 526 aa, Homo sapiens
  REGION 1..526: note = ENSP00000370348
MSITSDEVNFLVYRYLQESGFSHSAFTFGIESHISQSNINGTLVPPAALISILQKGLQYVEAEISINEDGTVFDGRPIESLSLIDAVMPDVVQTRQQAFREKLAQQQASAAAAAAAATAAATAATTTSAGVSHQNPSKNREATVNGEENRAHSVNNHAKPMEIDGEVEIPSSKATVLRGHESEVFICAWNPVSDLLASGSGDSTARIWNLNENSNGGSTQLVLRHCIREGGHDVPSNKDVTSLDWNTNGTLLATGSYDGFARIWTEDGNLASTLGQHKGPIFALKWNRKGNYILSAGVDKTTIIWDAHTGEAKQQFPFHSAPALDVDWQNNTTFASCSTDMCIHVCRLGCDRPVKTFQGHTNEVNAIKWDPSGMLLASCSDDMTLKIWSMKQEVCIHDLQAHNKEIYTIKWSPTGPATSNPNSNIMLASASFDSTVRLWDIERGVCTHTLTKHQEPVYSVAFSPDGKYLASGSFDKCVHIWNTQSGNLVHSYRGTGGIFEVCWNARGDKVGASASDGSVCVLDLRK

SEQ ID NO: 36967 - protein, 75 aa, Homo sapiens
  REGION 1..75: note = ENSP00000407069
MSITSDEVNFLVYRYLQESGFSHSAFTFGIESHISQSNINGTLVPPAALISILQKGLQYVEAEISINEDGTVFDG

SEQ ID NO: 36968 - protein, 577 aa, Homo sapiens
  REGION 1..577: note = ENSP00000217964
MTELAGASSSCCHRPAGRGAMQSVLHHFQRLRGREGGSHFINTSSPRGEAKMSITSDEVNFLVYRYLQESGFSHSAFTFGIESHISQSNINGTLVPPAALISILQKGLQYVEAEISINEDGTVFDGRPIESLSLIDAVMPDVVQTRQQAFREKLAQQQASAAAAAAAATAAATAATTTSAGVSHQNPSKNREATVNGEENRAHSVNNHAKPMEIDGEVEIPSSKATVLRGHESEVFICAWNPVSDLLASGSGDSTARIWNLNENSNGGSTQLVLRHCIREGGHDVPSNKDVTSLDWNTNGTLLATGSYDGFARIWTEDGNLASTLGQHKGPIFALKWNRKGNYILSAGVDKTTIIWDAHTGEAKQQFPFHSAPALDVDWQNNTTFASCSTDMCIHVCRLGCDRPVKTFQGHTNEVNAIKWDPSGMLLASCSDDMTLKIWSMKQEVCIHDLQAHNKEIYTIKWSPTGPATSNPNSNIMLASASFDSTVRLWDIERGVCTHTLTKHQEPVYSVAFSPDGKYLASGSFDKCVHIWNTQSGNLVHSYRGTGGIFEVCWNARGDKVGASASDGSVCVLDLRK

SEQ ID NO: 36969 - protein, 44 aa, Homo sapiens
  REGION 1..44: note = ENSP00000415508
MSITSDEVNFLVYRYLQESGFSHSAFTFGIESHISQSNINGTLV

SEQ ID NO: 36970 - protein, 79 aa, Homo sapiens
  REGION 1..79: note = ENSP00000397878
MTELAGASSSCCHRPAGRGAMQSVLHHFQRLRGREGGSHFINTSSPRGEAKMSITSDEVNFLVYRYLQESGFSHSAFTF

SEQ ID NO: 36971 - protein, 526 aa, Homo sapiens; identical to SEQ ID NO: 36966
  REGION 1..526: note = ENSP00000394097

SEQ ID NO: 36972 - protein, 577 aa, Homo sapiens; identical to SEQ ID NO: 36968
  REGION 1..577: note = ENSP00000385988

SEQ ID NO: 36973 - protein, 682 aa, Homo sapiens
  REGION 1..682: note = ENSP00000374205
MQLEHCLSPSIMLSKKFLNVSSSYPHSGGSELVLHDHPIISTTDNLERSSPLKKITRGMTNQSDTDNFPDSKDSPGDVQRSKLSPVLDGVSELRHSFDGSAADRYLLSQSSQPQSAATAPSAMFPYPGQHGPAHPAFSIGSPSRYMAHHPVITNGAYNSLLSNSSPQGYPTAGYPYPQQYGHSYQGAPFYQFSSTQPGLVPGKAQVYLCNRPLWLKFHRHQTEMIITKQGRRMFPFLSFNISGLDPTAHYNIFVDVILADPNHWRFQGGKWVPCGKADTNVQGNRVYMHPDSPNTGAHWMRQEISFGKLKLTNNKGASNNNGQMVVLQSLHKYQPRLHVVEVNEDGTEDTSQPGRVQTFTFPETQFIAVTAYQNTDITQLKIDHNPFAKGFRDNYDTIYTGCDMDRLTPSPNDSPRSQIVPGARYAMAGSFLQDQFVSNYAKARFHPGAGAGPGPGTDRSVPHTNGLLSPQQAEDPGAPSPQRWFVTPANNRLDFAASAYDTATDFAGNAATLLSYAAAGVKALPLQAAGCTGRPLGYYADPSGWGARSPPQYCGTKSGSVLPCWPNSAAAAARMAGANPYLGEEAEGLAAERSPLPPGAAEDAKPKDLSDSSWIETPSSIKSIDSSDSGIYEQAKRRRISPADTPVSESSSPLKSEVLAQRDCEKNCAKDISGYYGFYSHS

SEQ ID NO: 36974 - protein, 232 aa, Homo sapiens
  REGION 1..232: note = ENSP00000393934
FQGGKWVPCGKADTNVQGNRVYMHPDSPNTGAHWMRQEISFGKLKLTNNKGASNNNGQMVVLQSLHKYQPRLHVVEVNEDGTEDTSQPGRVQTFTFPETQFIAVTAYQNTDITQLKIDHNPFAKGFRDNYDTIYTGCDMDRLTPSPNDSPRSQIVPGARYAMAGSFLQDQFQAEDPGAPSPQRWFVTPANNRLDFAASAYDTATDFAGNAATLLSYAAAGVKALPLQAAGCT

SEQ ID NO: 36975 - protein, 395 aa, Homo sapiens
  REGION 1..395: note = ENSP00000387023
MHPDSPNTGAHWMRQEISFGKLKLTNNKGASNNNGQMVVLQSLHKYQPRLHVVEVNEDGTEDTSQPGRVQTFTFPETQFIAVTAYQNTDITQLKIDHNPFAKGFRDNYDTIYTGCDMDRLTPSPNDSPRSQIVPGARYAMAGSFLQDQFVSNYAKARFHPGAGAGPGPGTDRSVPHTNGLLSPQQAEDPGAPSPQRWFVTPANNRLDFAASAYDTATDFAGNAATLLSYAAAGVKALPLQAAGCTGRPLGYYADPSGWGARSPPQYCGTKSGSVLPCWPNSAAAAARMAGANPYLGEEAEGLAAERSPLPPGAAEDAKPKDLSDSSWIETPSSIKSIDSSDSGIYEQAKRRRISPADTPVSESSSPLKSEVLAQRDCEKNCAKDISGYYGFYSHS

SEQ ID NO: 36976 - protein, 466 aa, Homo sapiens
  REGION 1..466: note = ENSP00000388736
MELRKLYGPLCGYYLGRRMFIVISEPDMIKQVLVENFSNFTNRMASGLEFKSVADSVLFLRDKRWEEVRGALMSAFSPEKLNEMVPLISQACDLLLAHLKRYAESGDAFDIQRCYCNYTTDVVASVAFGTPVDSWQAPEDPFVKHCKRFFEFCIPRPILVLLLSFPSIMVPLARILPNKNRDELNGFFNKLIRNVIALRDQQAAEERRRDFLQMVLDARHSASPMGVQDFDIVRDVFSSTGCKPNPSRQHQPSPMARPLTVDEIVGQAFIFLIAGYEIITNTLSFATYLLATNPDCQEKLLREVDVFKEKHMAPEFCSLEEGLPYLDMVIAETLRMYPPAFRFTREAAQDCEVLGQRIPAGAVLEMAVGALHHDPEHWPSPETFNPERFTAEARQQHRPFTYLPFGAGPRSCLGVRLGLLEVKLTLLHVLHKFRFQACPETQVPLQLESKSALGPKNGVYIKIVSR

SEQ ID NO: 36977 - protein, 151 aa, Homo sapiens
  REGION 1..151: note = ENSP00000388612
MMEALGFLKLEVNGPMVTVALSVALLALLKWYSTSAFSRLEKLGLRHPKPSPFIGNLTFFRQGFWESQMELRKLYGPLCGYYLGRRMFIVISEPDMIKQVLVENFSNFTNRMASGLEFKSVADSVLFLRDKRWEEVRGALMSAFSPEKLNE

SEQ ID NO: 36978 - protein, 534 aa, Homo sapiens
  REGION 1..534: note = ENSP00000338087
MMEALGFLKLEVNGPMVTVALSVALLALLKWYSTSAFSRLEKLGLRHPKPSPFIGNLTFFRQGFWESQMELRKLYGPLCGYYLGRRMFIVISEPDMIKQVLVENFSNFTNRMASGLEFKSVADSVLFLRDKRWEEVRGALMSAFSPEKLNEMVPLISQACDLLLAHLKRYAESGDAFDIQRCYCNYTTDVVASVAFGTPVDSWQAPEDPFVKHCKRFFEFCIPRPILVLLLSFPSIMVPLARILPNKNRDELNGFFNKLIRNVIALRDQQAAEERRRDFLQMVLDARHSASPMGVQDFDIVRDVFSSTGCKPNPSRQHQPSPMARPLTVDEIVGQAFIFLIAGYEIITNTLSFATYLLATNPDCQEKLLREVDVFKEKHMAPEFCSLEEGLPYLDMVIAETLRMYPPAFRFTREAAQDCEVLGQRIPAGAVLEMAVGALHHDPEHWPSPETFNPERFTAEARQQHRPFTYLPFGAGPRSCLGVRLGLLEVKLTLLHVLHKFRFQACPETQVPLQLESKSALGPKNGVYIKIVSR

SEQ ID NO: 36979 - protein, 534 aa, Homo sapiens; identical to SEQ ID NO: 36978
  REGION 1..534: note = ENSP00000402536

SEQ ID NO: 36980 - protein, 80 aa, Homo sapiens
  REGION 1..80: note = ENSP00000415892
MMEALGFLKLEVNGPMVTVALSVALLALLKWYSTSAFSRLEKLGLRHPKPSPFIGNLTFFRQGFWESQMELRKLYGPLCG

SEQ ID NO: 36981 - protein, 152 aa, Homo sapiens
  REGION 1..152: note = ENSP00000391567
MMEALGFLKLEVNGPMVTVALSVALLALLKWYSTSAFSRLEKLGLRHPKPSPFIGNLTFFRQGFWESQMELRKLYGPLCGYYLGRRMFIVISEPDMIKQVLVENFSNFTNRMPQSIMPNSRHHVASRGMWPGGRRLACYLHPFRMAEGIAEV

SEQ ID NO: 36982 - protein, 580 aa, Homo sapiens
  REGION 1..580: note = ENSP00000411274
MMEALGFLKLEVNGPMVTVALSVALLALLKWYSTSAFSRLEKLGLRHPKPSPFIGNLTFFRQGFWESQMELRKLYGPLCGYYLGRRMFIVISEPDMIKQVLVENFSNFTNRMASGLEFKSVADSVLFLRDKRWEEVRGALMSAFSPEKLNELGLLIMQERIKGHMGGQQAPQRIPPTRLSKPSGIYVNLHYATLPFCMVPLISQACDLLLAHLKRYAESGDAFDIQRCYCNYTTDVVASVAFGTPVDSWQAPEDPFVKHCKRFFEFCIPRPILVLLLSFPSIMVPLARILPNKNRDELNGFFNKLIRNVIALRDQQAAEERRRDFLQMVLDARHSASPMGVQDFDIVRDVFSSTGCKPNPSRQHQPSPMARPLTVDEIVGQAFIFLIAGYEIITNTLSFATYLLATNPDCQEKLLREVDVFKEKHMAPEFCSLEEGLPYLDMVIAETLRMYPPAFRFTREAAQDCEVLGQRIPAGAVLEMAVGALHHDPEHWPSPETFNPERFTAEARQQHRPFTYLPFGAGPRSCLGVRLGLLEVKLTLLHVLHKFRFQACPETQVPLQLESKSALGPKNGVYIKIVSR

SEQ ID NO: 36983 - protein, 460 aa, Homo sapiens
  REGION 1..460: note = ENSP00000411326
MMEALGFLKLEVNGPMVTVALSVALLALLKWYSTSAFSRLEKLGLRHPKPSPFIGNLTFFRQGFWESQMELRKLYGPLCGYYLGRRMFIVISEPDMIKQVLVENFSNFTNRMASGLEFKSVADSVLFLRDKRWEEVRGALMSAFSPEKLNEMVPLISQACDLLLAHLKRYAESGDAFDIQRCYCNYTTDVVASVAFGTPVDSWQAPEDPFVKHCKRFFEFCIPRPILVLLLSFPSIMVPLARILPNKNRDELNGFFNKLIRNVIALRDQQAAEERRRDFLQMVLDARHSASPMGVQDFDIVRDVFSSTGCKPNPSRQHQPSPMARPLTVDEIVGQAFIFLIAGYEIITNTLSFATYLLATNPDCQEKLLREVDVFKEKHMAPEFCSLEEGLPYLDMVIAETLRMYPPAFRFTREAAQDCEVLGQRIPAGAVLEMAVGALHHDPEHWPSPETFNPERYRCS

SEQ ID NO: 36984 - protein, 81 aa, Homo sapiens
  REGION 1..81: note = ENSP00000412710
MMEALGFLKLEVNGPMVTVALSVALLALLKWYSTSAFSRLEKLGLRHPKPSPFIGNLTFFRQGFWESQMELRKLYGPLCGL

SEQ ID NO: 36985 - protein, 580 aa, Homo sapiens; identical to SEQ ID NO: 36982
  REGION 1..580: note = ENSP00000389414

SEQ ID NO: 36986 - protein, 227 aa, Homo sapiens
  REGION 1..227: note = ENSP00000332359
MEKLFNENEGMPSNQGKIDNEEQPPHEGKPEVACILEDKKLENEGNTENTGKRVEEPLKDKEKPESAGKAKGEGKSERKGKSEMQGGSKTEGKPERGGRAEGEGEPDSEREPESEGEPESETRAAGKRPAEDDIPRKAKRKTNKGLAQYLKQYKEAIHDMNFSNEDMIREFDNMARVEDKRRKSKQKLGAFLWMQRNLQDPFYPRGPREFRGGCRAPRRDTEDIPYV

SEQ ID NO: 36987 - protein, 227 aa, Homo sapiens; identical to SEQ ID NO: 36986
  REGION 1..227: note = ENSP00000361866

SEQ ID NO: 36988 - protein, 206 aa, Homo sapiens
  REGION 1..206: note = ENSP00000361765
MEKLYKENEGKPENERNLESEGKPEDEGSTEDEGKSDEEEKPDMEGKTECEGKREDEGEPGDEGQLEDEGNQEKQGKSEGEDKPQSEGKPASQAKPESQPRAAEKRPAEDYVPRKAKRKTDRGTDDSPKDSQEDLQERHLSSEEMMRECGDVSRAQEELRKKQKMGGFHWMQRDVQDPFAPRGQRGVRGVRGGGRGQKDLEDVPYV

SEQ ID NO: 36989 - protein, 183 aa, Homo sapiens
  REGION 1..183: note = ENSP00000361860
MEKPYNKNEGNLENEGKPEDEVEPDDEGKSDEEEKPDAEGKTECEGKRKAEGEPGDEGQLEDKGSQEKQGKSEGEGKPQGEGKPASQAKPEGQPRAAEKRPAGDYVPRKAKRKTDRGTDDSPKDSQEDLQERHLSSEEMMRECGDVSRAQEELRKKQKMGGFHWMQRDVQDPFAQGDNGVSGE

SEQ ID NO: 36990 - protein, 183 aa, Homo sapiens; identical to SEQ ID NO: 36989
  REGION 1..183: note = ENSP00000361859

SEQ ID NO: 36991 - protein, 100 aa, Homo sapiens
  REGION 1..100: note = ENSP00000329794
MQKPCKENEGKPKCSVPKREEKRPYGEFERQQTEGNFRQRLLQSLEEFKEDIDYRHFKDEEMTREGDEMERCLEEIRGLRKKFRALHSNHRHSRDRPYPI

SEQ ID NO: 36992 - protein, 100 aa, Homo sapiens; identical to SEQ ID NO: 36991
  REGION 1..100: note = ENSP00000361751

SEQ ID NO: 36993 - protein, 104 aa, Homo sapiens
  REGION 1..104: note = ENSP00000361745
MKSCQKMEGKPENESEPKHEEEPKPEEKPEEEEKLEEEAKAKGTFRERLIQSLQEFKEDIHNRHLSNEDMFREVDEIDEIRRVRNKLIVMRWKVNRNHPYPYLM

SEQ ID NO: 36994 - protein, 104 aa, Homo sapiens; identical to SEQ ID NO: 36993
  REGION 1..104: note = ENSP00000361740

SEQ ID NO: 36995 - protein, 586 aa, Homo sapiens
  REGION 1..586: note = ENSP00000357631
MQAGARFQRRRRQLQQQQPRRRQPLLWPMDAEPPPPPPWVWMVPGSAGLLRLSAGVVVPPVLLASAPPPAAPLLPGLPGWPAPSEPVLPLLPLPSAPDSAAAAAAHPFPALHGQWLFGGHSPSLGLPPSSTVELVPVFPHLCPSALATPIGKSWIDKRIPNCKIFFNNSFALDSTWIHPEESRFFHGHEKPRLLANQVAVSLSRPAPASRPLPTVVLAPQPIPGGCHNSLKVTSSPAIAIATAAAAAMVSVDPENLRGPSPSSVQPRHFLTLAPIKIPLRTSPVSDTRTERGRVARPPALMLRAQKSRDGDKEDKEPPPMLGGGEDSTARGNRPVASTPVPGSPWCVVWTGDDRVFFFNPTMHLSVWEKPMDLKDRGDLNRIIEDPPHKRKLEAPATDNSDGSSSEDNREDQDVKTKRNRTEGCGSPKPEEAKREDKGTRTPPPQILLPLEERVTHFRDMLLERGVSAFSTWEKELHKIVFDPRYLLLNSEERKQIFEQFVKTRIKEEYKEKKSKLLLAKEEFKKLLEESKVSPRTTFKEFAEKYGRDQRFRLVQKRKDQEHFFNQFILILKKRDKENRLRLRKMR

SEQ ID NO: 36996 - protein, 588 aa, Homo sapiens
  REGION 1..588: note = ENSP00000282111
MPQLGGGGGGGGGGSGGGGGSSAGAAGGGDDLGANDELIPFQDEGGEEQEPSSDSASAQRDLDEVKSSLVNESENQSSSSDSEAERRPQPVRDTFQKPRDYFAEVRRPQDSAFFKGPPYPGYPFLMIPDLSSPYLSNGPLSPGGARTYLQMKWPLLDVPSSATVKDTRSPSPAHLSNKVPVVQHPHHMHPLTPLITYSNDHFSPGSPPTHLSPEIDPKTGIPRPPHPSELSPYYPLSPGAVGQIPHPLGWLVPQQGQPMYSLPPGGFRHPYPALAMNASMSSLVSSRFSPHMVAPAHPGLPTSGIPHPAIVSPIVKQEPAPPSLSPAVSVKSPVTVKKEEEKKPHVKKPLNAFMLYMKEMRAKVVAECTLKESAAINQILGRKWHNLSREEQAKYYELARKERQLHSQLYPTWSARDNYGKKKKRKREKQLSQTQSQQQVQEAEGALASKSKKPCVQYLPPEKPCDSPASSHGSMLDSPATPSAALASPAAPAATHSEQAQPLSLTTKPETRAQLALHSAAFLSAKAAASSSGQMGSQPPLLSRPLPLGSMPTALLASPPSFPATLHAHQALPVLQAQPLSLVTKSAH

SEQ ID NO: 36997 - protein, 28 aa, Homo sapiens
  REGION 1..28: note = ENSP00000388984
MKWPLLDVPSSATVKDTRSPSPAHLSNK

SEQ ID NO: 36998 - protein, 556 aa, Homo sapiens
  REGION 1..556: note = ENSP00000317334
MEGPLSVFGDRSTGETIRSQNVMAAASIANIVKSSLGPVGLDKMLVDDIGDVTITNDGATILKLLEVEHPAAKVLCELADLQDKEVGDGTTSVVIIAAELLKNADELVKQKIHPTSVISGYRLACKEAVRYINENLIVNTDELGRDCLINAAKTSMSSKIIGINGDFFANMVVDAVLAIKYTDIRGQPRYPVNSVNILKAHGRSQMESMLISGYALNCVVGSQGMPKRIVNAKIACLDFSLQKTKMKLGVQVVITDPEKLDQIRQRESDITKERIQKILATGANVILTTGGIDDMCLKYFVEAGAMAVRRVLKRDLKRIAKASGATILSTLANLEGEETFEAAMLGQAEEVVQERICDDELILIKNTKARTSASIILRGANDFMCDEMERSLHDALCVVKRVLESKSVVPGGGAVEAALSIYLENYATSMGSREQLAIAEFARSLLVIPNTLAVNAAQDSTDLVAKLRAFHNEAQVNPERKNLKWIGLDLSNGKPRDNKQAGVFEPTIVKVKSLKFATEAAITILRIDDLIKLHPESKDDKHGSYEDAVHSGALND

SEQ ID NO: 36999 - protein, 332 aa, Homo sapiens
  REGION 1..332: note = ENSP00000439447
MPKRIVNAKIACLDFSLQKTKMKLGVQVVITDPEKLDQIRQRESDITKERIQKILATGANVILTTGGIDDMCLKYFVEAGAMAVRRVLKRDLKRIAKASGATILSTLANLEGEETFEAAMLGQAEEVVQERICDDELILIKNTKARTSASIILRGANDFMCDEMERSLHDALCVVKRVLESKSVVPGGGAVEAALSIYLENYATSMGSREQLAIAEFARSLLVIPNTLAVNAAQDSTDLVAKLRAFHNEAQVNPERKNLKWIGLDLSNGKPRDNKQAGVFEPTIVKVKSLKFATEAAITILRIDDLIKLHPESKDDKHGSYEDAVHSGALND

SEQ ID NO: 37000 - protein, 433 aa, Homo sapiens
  REGION 1..433: note = ENSP00000390159
MEGPLSVFGDRSTGETIRSQNVMAAASIANIVKSSLGPVGLDKMLVDDIGDVTITNDGATILKLLEVEHPAAKVLCELADLQDKEVGDGTTSVVIIAAELLKNADELVKQKIHPTSVISGYRLACKEAVRYINENLIVNTDELGRDCLINAAKTSMSSKIIGINGDFFANMVVDAVLAIKYTDIRGQPRYPVNSVNILKAHGRSQMESMLISGYALNCVVGSQGMPKRIVNAKIACLDFSLQKTKMKLGVQVVITDPEKLDQIRQRESDITKERIQKILATGANVILTTGGIDDMCLKYFVEAGAMAVRRVLKRDLKRIAKASGATILSTLANLEGEETFEAAMLGQAEEVVQERICDDELILIKNTKARTSASIILRGANDFMCDEMERSLHDALCVVKRVLESKSVVPGGGAVEAALSIYLENYATSMDWS

SEQ ID NO: 37001 - protein, 401 aa, Homo sapiens
  REGION 1..401: note = ENSP00000376008
MSSKIIGINGDFFANMVVDAVLAIKYTDIRGQPRYPVNSVNILKAHGRSQMESMLISGYALNCVVGSQGMPKRIVNAKIACLDFSLQKTKMKLGVQVVITDPEKLDQIRQRESDITKERIQKILATGANVILTTGGIDDMCLKYFVEAGAMAVRRVLKRDLKRIAKASGATILSTLANLEGEETFEAAMLGQAEEVVQERICDDELILIKNTKARTSASIILRGANDFMCDEMERSLHDALCVVKRVLESKSVVPGGGAVEAALSIYLENYATSMGSREQLAIAEFARSLLVIPNTLAVNAAQDSTDLVAKLRAFHNEAQVNPERKNLKWIGLDLSNGKPRDNKQAGVFEPTIVKVKSLKFATEAAITILRIDDLIKLHPESKDDKHGSYEDAVHSGALND

SEQ ID NO: 37002 - protein, 221 aa, Homo sapiens
  REGION 1..221: note = ENSP00000441345
MEGPLSVFGDRSTGETIRSQNGMPKRIVNAKIACLDFSLQKTKMKLGVQVVITDPEKLDQIRQRESDITKERIQKILATGANVILTTGGIDDMCLKYFVEAGAMAVRRVLKRDLKRIAKASGATILSTLANLEGEETFEAAMLGQAEEVVQERICDDELILIKNTKARTSASIILRGANDFMCDEMERSLHDALCVVKRVLESKSVVPGGGAVEAALSIYL

SEQ ID NO: 37003 - protein, 65 aa, Homo sapiens
  REGION 1..65: note = ENSP00000440617
MEGPLSVFGDRSTGETIRSQNVMAAASIANIVKSSLGPVGLDKMLVDDIGWFIFFPANFLGCNHY

SEQ ID NO: 37004 - protein, 59 aa, Homo sapiens
  REGION 1..59: note = ENSP00000442185
MELLQWEAVRYINENLIVNTDELGRDCLINAAKTSMSSKIIGINGDFFANMVVDAVLAI

SEQ ID NO: 37005 - protein, 100 aa, Homo sapiens
  REGION 1..100: note = ENSP00000444423
MEGPLSVFGDRSTGETIRSQNVMAAASIANIVKSSLGPVGLDKMLVDDIGDVTITNDGATILKLLEVEHPAAKVLCELADLQDKEVGDGTTSVGSSALYQ

SEQ ID NO: 37006 - protein, 136 aa, Homo sapiens
  REGION 1..136: note = ENSP00000439671
MAAASIANIVKSSLGPVGLDKMLVDDIGDVTITNDGATILKLLEVEHPAAKVLCELADLQDKEVGDGTTSVVIIAAELLKNADELVKQKIHPTSVISGYRLACKEAVRYINENLIVNTDELGRDCLINAAKTSMSS

SEQ ID NO: 37007 - protein, 111 aa, Homo sapiens
  REGION 1..111: note = ENSP00000437840
MAAASIANIVKSSLGPVGLDKMLVDDIGDVTITNDGATILKLLEVEHPAAKVLCELADLQDKEVGDGTTSVVIIAAELLKNADELVKQKIHPTSVISGYRLACKEAVRYIN

SEQ ID NO: 37008 - protein, 91 aa, Homo sapiens
  REGION 1..91: note = ENSP00000442856
MAAASIANIVKSSLGPVGLDKMLVDDIGDVTITNDGATILKLLEVEHPAAKVLCELADLQDKEVGDGTTSVVIIAAELLKNADELVKQKIH

SEQ ID NO: 37009 - protein, 17 aa, Homo sapiens
  REGION 1..17: note = ENSP00000447416
MPFNGEKQCVGEDQPSD

SEQ ID NO: 37010 - protein, 266 aa, Homo sapiens
  REGION 1..266: note = ENSP00000448952
MPFNGEKQCVGEDQPSDSDSSRFSESMASLSDYECSRQSFASDSSSKSSSPASTSPPRVVTFDEVMATARNLSNLTLAHEIAVNENFQLKQEALPEKSLAGRVKHIVHQAFWDVLDSELNADPPEFEHAIKLFEEIREILLSFLTPGGNRLRNQICEVLDTDLIRQQAEHSAVDIQGLANYVISTMGKLCAPVRDNDIRELKATGNIVEVLRQIFHVLDLMQMDMANFTIMSLRPHLQRQLVEYERTKFQEILEETPRKAEVAGAS

SEQ ID NO: 37011 - protein, 519 aa, Homo sapiens
  REGION 1..519: note = ENSP00000299045
MPFNGEKQCVGEDQPSDSDSSRFSESMASLSDYECSRQSFASDSSSKSSSPASTSPPRVVTFDEVMATARNLSNLTLAHEIAVNENFQLKQEALPEKSLAGRVKHIVHQAFWDVLDSELNADPPEFEHAIKLFEEIREILLSFLTPGGNRLRNQICEVLDTDLIRQQAEHSAVDIQGLANYVISTMGKLCAPVRDNDIRELKATGNIVEVLRQIFHVLDLMQMDMANFTIMSLRPHLQRQLVEYERTKFQEILEETPSALDQTTEWIKESVNEELFSLSESALTPGAENTSKPSLSPTLVLNNSYLKLLQWDYQKKELPETLMTDGARLQELTEKLNQLKIIACLSLITNNMVGAITGGLPELASRLTRISAVLLEGMNKETFNLKEVLNSIGIQTCVEVNKTLMERGLPTLNAEIQANLIGQFSSIEEEDNPIWSLIDKRIKLYMRRLLCLPSPQKCMPPMPGGLAVIQQELEALGSQYANIVNLNKQVYGPFYANILRKLLFNEEAMGKVDASPPTN

SEQ ID NO: 37012 - protein, 272 aa, Homo sapiens
  REGION 1..272: note = ENSP00000449123
MPFNGEKQCVGEDQPSDSDSSRFSESMASLSDYECSRQSFASDSSSKSSSPASTSPPRVVTFDEVMATARNLSNLTLAHEIAVNENFQLKQEALPEKSLAGRVKHIVHQAFWDVLDSELNADPPEFEHAIKLFEEIREILLSFLTPGGNRLRNQICEVLDTDLIRQQAEHSAVDIQGLANYVISTMGKLCAPVRDNDIRELKATGNIVEVLRQIFHVLDLMQMDMANFTIMSLRPHLQRQLVEYERTKFQEILEETPSEYNIMCIYIEIRLK

SEQ ID NO: 37013 - protein, 234 aa, Homo sapiens
  REGION 1..234: note = ENSP00000448629
MPFNGEKQCVGEDQPSDSDSSRFSESMASLSDYECSRQSFASDSSSKSSSPASTSPPRVVTFDEVMATARNLSNLTLAHEIAVNENFQLKQEALPEKSLAGRVKHIVHQAFWDVLDSELNADPPEFEHAIKLFEEIREILLSFLTPGGNRLRNQICEVLDTDLIRQQAEHSAVDIQGLANYVISTMGKLCAPVRDNDIRELKATGNIVEVLRQIFHVLDLMQMDMANFTIMSLR

SEQ ID NO: 37014 - protein, 60 aa, Homo sapiens
  REGION 1..60: note = ENSP00000448064
MPFNGEKQCVGEDQPSDSDSSRFSESMASLSDYECSRQSFASDSSSKSSSPALLYEHLTA

SEQ ID NO: 37015 - protein, 131 aa, Homo sapiens
  REGION 1..131: note = ENSP00000447174
MPFNGEKQCVGEDQPSDSDSSRFSESMASLSDYECSRQSFASDSSSKSSSPASTSPPRVVTFDEVMATARNLSNLTLAHEIAVNENFQLKQEALPEKSLAGRVKHIVHQAFWDVLDSELNADPPEFEHAIK

SEQ ID NO: 37016 - protein, 97 aa, Homo sapiens
  REGION 1..97: note = ENSP00000447457
MPFNGEKQCVGEDQPSDSDSSRFSESMASLSDYECSRQSFASDSSSKSSSPASTSPPRVVTFDEVMATARNLSNLTLAHEIAVNENFQLKQEALPEK

SEQ ID NO: 37017 - protein, 17 aa, Homo sapiens
  REGION 1..17: note = ENSP00000449844
MPFNGEKQCVGEDQPSD

SEQ ID NO: 37018 - protein, 501 aa, Homo sapiens
  REGION 1..501: note = ENSP00000360560
MQDTVTTSALLDPSHSSVSTQDNSSTGGHTSSTSPQLSKPSITPVPAKSRNPHPRANIRRMRRIIAEDPEWSLAIVPLLTELCIQHIIRNFQKNPILKQMLPEHQQKVLNHLSPDLPLAVTANLIDSENYWLRCCMHRWPVCHVAHHGGSWKRMFFERHLENLLKHFIPGTTDPAVILDLLPLCRNYVRRVHVDQFLPPVQLPAQLRPGDQSDSGSEGEMEEPTVDHYQLGDLVAGLSHLEELDLVYDVKDCGMNFEWNLFLFTYRDCLSLAAAIKACHTLKIFKLTRSKVDDDKARIIIRSLLDHPVLEELDLSQNLIGDRGARGAAKLLSHSRLRVLNLANNQVRAPGAQSLAHALAHNTNLISLNLRLNCIEDEGGQALAHALQTNKCLTTLHLGGNELSEPTATLLSQVLAINTTLTSINLSCNHIGLDGGKQLLEGMSDNKTLLEFDLRLSDVAQESEYLIGQALYANREAARQRALNPSHFMSTITANGPENSVG

SEQ ID NO: 37019 - protein, 198 aa, Homo sapiens
  REGION 1..198: note = ENSP00000360559
MFFERHLENLLKHFIPGTTDPAVILDLLPLCRNYVRRVHVDQFLPPVQLPAQLRPGDQSDSGSEGEMEEPTVDHYQLGDLVAGLSHLEELDLVYDVKDCGMNFEWNLFLFTYRDCLSLAAAIKACHTLKDGGKQLLEGMSDNKTLLEFDLRLSDVAQESEYLIGQALYANREAARQRALNPSHFMSTITANGPENSVG

SEQ ID NO: 37020 - protein, 179 aa, Homo sapiens
  REGION 1..179: note = ENSP00000282670
MMMSDNAKGRAAHSWKKRGSISSLSNHEFWRKEIHGRIKDSMSTVSYMEEPSQRDDISRLTVQMENTYQLGPPKHFPVVTVNHILKDVVTSYLQVEEYEPELCRQMTKTISEVIKAQVKDLMIPRYKLIVIVHIGQLNRQSILIGSRCLWDPKSDTFSSYVFRNSSLFALANVYAVYLE

SEQ ID NO: 37021 - protein, 76 aa, Homo sapiens
  REGION 1..76: note = ENSP00000436731
MMMSDNAKGRAAHSWKKRGSISSLSNHEFWRKEIHGRIKDSMSTVSYMEEPSQRDDISRLTVQMENTYQLAQYKGL

SEQ ID NO: 37022 - protein, 191 aa, Homo sapiens
  REGION 1..191: note = ENSP00000452042
MSQEGDYGRWTISSSDESEEEKPKPDKPSTSSLLCARQGAANEPRYTCSEAQKAAHKRKISPVKFSNTDSVLPPKRQKSGSQEDLGWCLSSSDDELQPEMPQKQAEKVVIKKEKDISAPNDGTAQRTENHGAPACHRLKEEEDEYETSGEGQDIWDMLDKGNPFQFYLTRVSGVKPKYNSGALHIKGQSYE

SEQ ID NO: 37023 - protein, 589 aa, Homo sapiens
  REGION 1..589: note = ENSP00000377098
MSQEGDYGRWTISSSDESEEEKPKPDKPSTSSLLCARQGAANEPRYTCSEAQKAAHKRKISPVKFSNTDSVLPPKRQKSGSQEDLGWCLSSSDDELQPEMPQKQAEKVVIKKEKDISAPNDGTAQRTENHGAPACHRLKEEEDEYETSGEGQDIWDMLDKGNPFQFYLTRVSGVKPKYNSGALHIKDILSPLFGTLVSSAQFNYCFDVDWLVKQYPPEFRKKPILLVHGDKREAKAHLHAQAKPYENISLCQAKLDIAFGTHHTKMMLLLYEEGLRVVIHTSNLIHADWHQKTQGIWLSPLYPRIADGTHKSGESPTHFKADLISYLMAYNAPSLKEWIDVIHKHDLSETNVYLIGSTPGRFQGSQKDNWGHFRLKKLLKDHASSMPNAESWPVVGQFSSVGSLGADESKWLCSEFKESMLTLGKESKTPGKSSVPLYLIYPSVENVRTSLEGYPAGGSLPYSIQTAEKQNWLHSYFHKWSAETSGRSNAMPHIKTYMRPSPDFSKIAWFLVTSANLSKAAWGALEKNGTQLMIRSYELGVLFLPSAFAPAKRIKDEVEASFSGSRQFQSETEVLRWQPGANGHLSCAI

SEQ ID NO: 37024 - protein, 279 aa, Homo sapiens
  REGION 1..279: note = ENSP00000450872
MSQEGDYGRWTISSSDESEEEKPKPDKPSTSSLLCARQGAANEPRYTCSEAQKAAHKRKISPVKFSNTDSVLPPKRQKSGSQEDLGWCLSSSDDELQPEMPQKQAEKVVIKKEKDISAPNDGTAQRTENHGAPACHRLKEEEDEYETSGEGQDIWDMLDKGNPFQFYLTRVSGVKPKYNSGALHIKDILSPLFGTLVSSAQFNYCFDVDWLVKQYPPEFRKKPILLVHGDKREAKAHLHAQAKPYENISLCQAKLDIAFGTHHTKMMLLLYEEGLRVVI

SEQ ID NO: 37025 - protein, 608 aa, Homo sapiens
  REGION 1..608: note = ENSP00000377099
MSQEGDYGRWTISSSDESEEEKPKPDKPSTSSLLCARQGAANEPRYTCSEAQKAAHKRKISPVKFSNTDSVLPPKRQKSGSQEDLGWCLSSSDDELQPEMPQKQAEKVVIKKEKDISAPNDGTAQRTENHGAPACHRLKEEEDEYETSGEGQDIWDMLDKGNPFQFYLTRVSGVKPKYNSGALHIKDILSPLFGTLVSSAQFNYCFDVDWLVKQYPPEFRKKPILLVHGDKREAKAHLHAQAKPYENISLCQAKLDIAFGTHHTKMMLLLYEEGLRVVIHTSNLIHADWHQKTQGIWLSPLYPRIADGTHKSGESPTHFKADLISYLMAYNAPSLKEWIDVIHKHDLSETNVYLIGSTPGRFQGSQKDNWGHFRLKKLLKDHASSMPNAESWPVVGQFSSVGSLGADESKWLCSEFKESMLTLGKESKTPGKSSVPLYLIYPSVENVRTSLEGYPAGGSLPYSIQTAEKQNWLHSYFHKWSAETSGRSNAMPHIKTYMRPSPDFSKIAWFLVTSANLSKAAWGALEKNGTQLMIRSYELGVLFLPSAFGLDSFKVKQKFFAGSQEPMATFPVPYDLPPELYGSKDRPWIWNIPYVKAPDTHGNMWVPS

SEQ ID NO: 37026 - protein, 219 aa, Homo sapiens
  REGION 1..219: note = ENSP00000450708
MPQKQAEKVVIKKEKDISAPNDGTAQRTENHGAPACHRLKEEEDEYETSGEGQDIWDMLDKGNPFQFYLTRVSGVKPKYNSGALHIKDILSPLFGTLVSSAQFNYCFDVDWLVKQYPPEFRKKPILLVHGDKREAKAHLHAQAKPYENISLCQAKLDIAFGTHHTKMMLLLYEEGLRVVIHTSNLIHADWHQKTQGIWLSPLYPRIADGTHKSGESPTH

SEQ ID NO: 37027 - protein, 608 aa, Homo sapiens; identical to SEQ ID NO: 37025
  REGION 1..608: note = ENSP00000337353

SEQ ID NO: 37028 - protein, 151 aa, Homo sapiens
  REGION 1..151: note = ENSP00000452279
MSQEGDYGRWTISSSDESEEEKPKPDKPSTSSLLCARQGAANEPRYTCSEAQKAAHKRKISPVKFSNTDSVLPPKRQKSGSQEDLGWCLSSSDDELQPEMPQKQAEKVVIKKEKDISAPNDGTAQRTENHGAPACHRLKEEEDEYETSGEG

SEQ ID NO: 37029 - protein, 146 aa, Homo sapiens
  REGION 1..146: note = ENSP00000451358
MSQEGDYGRWTISSSDESEEEKPKPDKPSTSSLLCARQGAANEPRYTCSEAQKAAHKRKISPVKFSNTDSVLPPKRQKSGSQEDLGWCLSSSDDELQPEMPQKQAEKVVIKKEKDISAPNDGTAQRTENHGAPACHRLKEEEDEYE

SEQ ID NO: 37030 - protein, 147 aa, Homo sapiens
  REGION 1..147: note = ENSP00000452333
MSQEGDYGRWTISSSDESEEEKPKPDKPSTSSLLCARQGAANEPRYTCSEAQKAAHKRKISPVKFSNTDSVLPPKRQKSGSQEDLGWCLSSSDDELQPEMPQKQAEKVVIKKEKDISAPNDGTAQRTENHGAPACHRLKEEEDEYET

SEQ ID NO: 37031 - protein, 298 aa, Homo sapiens
  REGION 1..298: note = ENSP00000444587
MSQEGDYGRWTISSSDESEEEKPKPDKPSTSSLLCARQGAANEPRYTCSEAQKAAHKRKISPVKFSNTDSVLPPKRQKSGSQEDLGWCLSSSDDELQPEMPQKQAEKVVIKKEKDISAPNDGTAQRTENHGAPACHRLKEEEDEYETSGEGQDIWDMLDKGNPFQFYLTRVSGVKPKYNSGALHIKDILSPLFGTLVSSAQFNYCFDVDWLVKQYPPEFRKKPILLVHGDKREAKAHLHAQAKPYENISLCQAKLDIAFGTHHTKMMLLLYEEGLRVVIHTSNLIHADWHQKTQGTHL

SEQ ID NO: 37032 - protein, 259 aa, Homo sapiens
  REGION 1..259: note = ENSP00000452363
MSQEGDYGRWTISSSDESEEEKPKPDKPSTSSLLCARQGAANEPRYTCSEAQKAAHKRKISPVKFSNTDSVLPPKRQKSGSQEDLGWCLSSSDDELQPEMPQKQAEKVVIKKEKDISAPNDGTAQRTENHGAPACHRLKEEEDEYETSGEGQDIWDMLDKGNPFQFYLTRVSGVKPKYNSGALHIKDILSPLFGTLVSSAQFNYCFDVDWLVKQYPPEFRKKPILLVHGDKREAKAHLHAQAKPYENISLCQENDAAAL

SEQ ID NO: 37033 - protein, 161 aa, Homo sapiens
  REGION 1..161: note = ENSP00000452183
MSQEGDYGRWTISSSDESEEEKPKPDKPSTSSLLCARQGAANEPRYTCSEAQKAAHKRKISPVKFSNTDSVLPPKRQKSGSQEDLGWCLSSSDDELQPEMPQKQAEKVVIKKEKDISAPNDGTAQRTENHGAPACHRLKEEEDEYETSGEGQDIWDMLDKG

SEQ ID NO: 37034 - protein, 578 aa, Homo sapiens
  REGION 1..578: note = ENSP00000450628
MSQEGDYGRWTISSSDESEEEKPKPDKPSTSSLLCARQGAANEPRYTCSEAQKAAHKRKISPVKFSNTDSVLPPKRQKSGSQEDLGWCLSSSDDELQPEMPQKQAEKVVIKKEKDISAPNDGTAQRTENHGAPACHRLKEEEDEYETSGEGQDIWDMLDKGNPFQFYLTRVSGVKPKYNSGALHIKDILSPLFGTLVSSAQFNYCFDVDWLVKQYPPEFRKKPILLVHGDKREAKAHLHAQAKPYENISLCQAKLDIAFGTHHTKMMLLLYEEGLRVVIHTSNLIHADWHQKTQGIWLSPLYPRIADGTHKSGESPTHFKADLISYLMAYNAPSLKEWIDVIHKHDLSETNVYLIGSTPGRFQGSQKDNWGHFRLKKLLKDHASSMPNAESWPVVGQFSSVGSLGADESKWLCSEFKESMLTLGKESKTPGKSSVPLYLIYPSVENVRTSLEGYPAGGSLPYSIQTAEKQNWLHSYFHKWSAETSGRSNAMPHIKTYMRPSPDFSKIAWFLVTSANLSKAAWGALEKNGTQLMIRSYELGVLFLPSAFIGHGYGTFLMSKHRIRMGTCGCPPENLEAL

SEQ ID NO: 37035 - protein, 51 aa, Homo sapiens
  REGION 1..51: note = ENSP00000451767
AKLDIAFGTHHTKMMLLLYEEGLRVVIHTSNLIHADWHQKTQGHFVHLCLC

SEQ ID NO: 37036 - protein, 281 aa, Homo sapiens
  REGION 1..281: note = ENSP00000450795
  VARIANT 1: note = Any amino acid
XRFQGSQKDNWGHFRLKKLLKDHASSMPNAESWPVVGQFSSVGSLGADESKWLCSEFKESMLTLGKESKTPGKSSVPLYLIYPSVENVRTSLEGYPAGGSLPYSIQTAEKQNWLHSYFHKWSAETSGRSNAMPHIKTYMRPSPDFSKIAWFLVTSANLSKAAWGALEKNGTQLMIRSYELGVLFLPSAFGLDSFKVKQKFFAGSQEPMATFPVPYDLPPELYGSKGETQIKENHGWICIRKTNRAQEKPLVSVGSWLMEPSGSSSLQRALCQPVWGLVATG

SEQ ID NO: 37037 - protein, 426 aa, Homo sapiens
  REGION 1..426: note = ENSP00000435233
IEPSSWSGSESPAENMERMSDSADKPIDNDAEGVWSPDIEQSFQEALAIYPPCGRRKIILSDEGKMYGRNELIARYIKLRTGKTRTRKQVSSHIQVLARRKSRDFHSKLKDQTAKDKALQHMAAMSSAQIVSATAIHNKLGLPGIPRPTFPGAPGFWPGMIQTGQPGSSQDVKPFVQQAYPIQPAVTAPIPGFEPASAPAPSVPAWQGRSIGTTKLRLVEFSAFLEQQRDPDSYNKHLFVHIGHANHSYSDPLLESVDIRQIYDKFPEKKGGLKELFGKGPQNAFFLVKFWADLNCNIQDDAGAFYGVTSQYESSENMTVTCSTKVCSFGKQVVEKVETEYARFENGRFVYRINRSPMCEYMINFIHKLKHLPEKYMMNSVLENFTILLVVTNRDTQETLLCMACVFEVSNSEHGAQHHIYRLVKD

SEQ ID NO: 37038 - protein, 159 aa, Homo sapiens
  REGION 1..159: note = ENSP00000432587
  VARIANT 1: note = Any amino acid
XDAPPPLHLCPERGQQPSAPAGPGAGAVLGRGGVAGPRDREPGREPGTEQRAGEAAPKFASDSPGAAVAPWAEVYFLEKAPGFGLENPTAKIEPSSWSGSESPAENMERMSDSADKPIDNDAEGVWSPDIEQSFQEALAIYPPCGRRKIILSDEGKMYG

SEQ ID NO: 37039 - protein, 368 aa, Homo sapiens
  REGION 1..368: note = ENSP00000435977
IEPSSWSGSESPAENMERMSDSADKPIDNDAEGVWSPDIEQSFQEALAIYPPCGRRKIILSDEGKMYGRNELIARYIKLRTGKTRTRKQVSSHIQVLARRKSRDFHSKLKDQTAKDKALQHMAAMSSAQIVSATAIHNKLGLPGIPRPTFPGAPGFWPGMIQTGQPGSSQDVKPFVQQAYPIQPAVTAPIPGFEPASAPAPSVPAWQGRSIGTTKLRLVEFSAFLEQQRDPDSADLNCNIQDDAGAFYGVTSQYESSENMTVTCSTKVCSFGKQVVEKVETEYARFENGRFVYRINRSPMCEYMINFIHKLKHLPEKYMMNSVLENFTILLVVTNRDTQETLLCMACVFEVSNSEHGAQHHIYRLVKD

SEQ ID NO: 37040 - protein, 330 aa, Homo sapiens
  REGION 1..330: note = ENSP00000435393
MRYVLSWCVTVTFKDQTAKDKALQHMAAMSSAQIVSATAIHNKLGLPGIPRPTFPGAPGFWPGMIQTGQPGSSQDVKPFVQQAYPIQPAVTAPIPGFEPASAPAPSVPAWQGRSIGTTKLRLVEFSAFLEQQRDPDSYNKHLFVHIGHANHSYSDPLLESVDIRQIYDKFPEKKGGLKELFGKGPQNAFFLVKFWADLNCNIQDDAGAFYGVTSQYESSENMTVTCSTKVCSFGKQVVEKVETEYARFENGRFVYRINRSPMCEYMINFIHKLKHLPEKYMMNSVLENFTILLVVTNRDTQETLLCMACVFEVSNSEHGAQHHIYRLVKD

SEQ ID NO: 37041 - protein, 426 aa, Homo sapiens
  REGION 1..426: note = ENSP00000491500
MEPSSWSGSESPAENMERMSDSADKPIDNDAEGVWSPDIEQSFQEALAIYPPCGRRKIILSDEGKMYGRNELIARYIKLRTGKTRTRKQVSSHIQVLARRKSRDFHSKLKDQTAKDKALQHMAAMSSAQIVSATAIHNKLGLPGIPRPTFPGAPGFWPGMIQTGQPGSSQDVKPFVQQAYPIQPAVTAPIPGFEPASAPAPSVPAWQGRSIGTTKLRLVEFSAFLEQQRDPDSYNKHLFVHIGHANHSYSDPLLESVDIRQIYDKFPEKKGGLKELFGKGPQNAFFLVKFWADLNCNIQDDAGAFYGVTSQYESSENMTVTCSTKVCSFGKQVVEKVETEYARFENGRFVYRINRSPMCEYMINFIHKLKHLPEKYMMNSVLENFTILLVVTNRDTQETLLCMACVFEVSNSEHGAQHHIYRLVKD

SEQ ID NO: 37042 - protein, 357 aa, Homo sapiens
  REGION 1..357: note = ENSP00000334754
MERMSDSADKPIDNDAEGVWSPDIEQSFQEALAIYPPCGRRKIILSDEGKMYGRNELIARYIKLRTGKTRTRKQVSSHIQVLARRKSRDFHSKLKVTSMDQTAKDKALQHMAAMSSAQIVSATAIHNKLGLPGIPRPTFPGAPGFWPGMIQTGQPGSSQDVKPFVQQAYPIQPAVTAPIPGFEPASAPAPSVPAWQGRSIGTTKLRLVEFSAFLEQQRDPDSADLNCNIQDDAGAFYGVTSQYESSENMTVTCSTKVCSFGKQVVEKVETEYARFENGRFVYRINRSPMCEYMINFIHKLKHLPEKYMMNSVLENFTILLVVTNRDTQETLLCMACVFEVSNSEHGAQHHIYRLVKD

SEQ ID NO: 37043 - protein, 391 aa, Homo sapiens
  REGION 1..391: note = ENSP00000351184
LEGTAGTITSNEWSSPTSPEGSTASGGSQALDKPIDNDAEGVWSPDIEQSFQEALAIYPPCGRRKIILSDEGKMYGRNELIARYIKLRTGKTRTRKQVSSHIQVLARRKAREIQAKLKFWQGALPGQAGTSHDVKPFSQQTYAVQPPLPLPGFESPAGPAPSPSAPPAPPWQGRSVASSKLWMLEFSAFLEQQQDPDTYNKHLFVHIGQSSPSYSDPYLEAVDIRQIYDKFPEKKGGLKDLFERGPSNAFFLVKFWADLNTNIEDEGSSFYGVSSQYESPENMIITCSTKVCSFGKQVVEKVETEYARYENGHYSYRIHRSPLCEYMINFIHKLKHLPEKYMMNSVLENFTILQVVTNRDTQETLLCIAYVFEVSASEHGAQHHIYRLVKE

SEQ ID NO: 37044 - protein, 22 aa, Homo sapiens
  REGION 1..22: note = ENSP00000438960
LEGTAGTITSNEWSSPTSPEGS

SEQ ID NO: 37045 - protein, 72 aa, Homo sapiens
  REGION 1..72: note = ENSP00000438453
LEGTAGTITSNEWSSPTSPEGSTASGGSQALDKPIDNDAEGVWSPDIEQSFQEALAIYPPCGRRKIILSDEG

SEQ ID NO: 37046 - protein, 434 aa, Homo sapiens
  REGION 1..434: note = ENSP00000352926
LEGTAGTITSNEWSSPTSPEGSTASGGSQALDKPIDNDAEGVWSPDIEQSFQEALAIYPPCGRRKIILSDEGKMYGRNELIARYIKLRTGKTRTRKQVSSHIQVLARRKAREIQAKLKDQAAKDKALQSMAAMSSAQIISATAFHSSMALARGPGRPAVSGFWQGALPGQAGTSHDVKPFSQQTYAVQPPLPLPGFESPAGPAPSPSAPPAPPWQGRSVASSKLWMLEFSAFLEQQQDPDTYNKHLFVHIGQSSPSYSDPYLEAVDIRQIYDKFPEKKGGLKDLFERGPSNAFFLVKFWADLNTNIEDEGSSFYGVSSQYESPENMIITCSTKVCSFGKQVVEKVETEYARYENGHYSYRIHRSPLCEYMINFIHKLKHLPEKYMMNSVLENFTILQVVTNRDTQETLLCIAYVFEVSASEHGAQHHIYRLVKE

SEQ ID NO: 37047 - protein, 175 aa, Homo sapiens
  REGION 1..175: note = ENSP00000444528
LEGTAGTITSNEWSSPTSPEGSTASGGSQALDKPIDNDAEGVWSPDIEQSFQEALAIYPPCGRRKIILSDEGKMYGRNELIARYIKLRTGKTRTRKQVSSHIQVLARRKAREIQAKLKDQAAKDKALQSMAAMSSAQIISATAFHSSMALARGPGRPAVSGFWQGALPGQAGTSH

SEQ ID NO: 37048 - protein, 305 aa, Homo sapiens
  REGION 1..305: note = ENSP00000380311
MAAMSSAQIISATAFHSSMALARGPGRPAVSGFWQGALPGQAGTSHDVKPFSQQTYAVQPPLPLPGFESPAGPAPSPSAPPAPPWQGRSVASSKLWMLEFSAFLEQQQDPDTYNKHLFVHIGQSSPSYSDPYLEAVDIRQIYDKFPEKKGGLKDLFERGPSNAFFLVKFWADLNTNIEDEGSSFYGVSSQYESPENMIITCSTKVCSFGKQVVEKVETEYARYENGHYSYRIHRSPLCEYMINFIHKLKHLPEKYMMNSVLENFTILQVVTNRDTQETLLCIAYVFEVSASEHGAQHHIYRLVKE

SEQ ID NO: 37049 - protein, 110 aa, Homo sapiens
  REGION 1..110: note = ENSP00000411475
LEGTAGTITSNEWSSPTSPEGSTASGGSQALDKPIDNDAEGVWSPDIEQSFQEALAIYPPCGRRKIILSDEGKMYGLQPHPGAGSSQSSRDPGQAKVLARSFARPSRNVP

SEQ ID NO: 37050 - protein, 189 aa, Homo sapiens
  REGION 1..189: note = ENSP00000441959
  VARIANT 1: note = Any amino acid
XGKTRTRKQVSSHIQVLARRKAREIQAKLKTGAELGTCGREDQAAKDKALQSMAAMSSAQIISATAFHSSMALARGPGRPAVSGFWQGALPGQAGTSHDVKPFSQQTYAVQPPLPLPGFESPAGPAPSPSAPPAPPWQGRSVASSKLWMLEFSAFLEQQQDPDTYNKHLFVHIGQSSPSYSDPYLEAVD

SEQ ID NO: 37051 - protein, 631 aa, Homo sapiens
  REGION 1..631: note = ENSP00000370912
MNFNTILEEILIKRSQQKKKTSPLNYKERLFVLTKSMLTYYEGRAEKKYRKGFIDVSKIKCVEIVKNDDGVIPCQNKYPFQVVHDANTLYIFAPSPQSRDLWVKKLKEEIKNNNNIMIKYHPKFWTDGSYQCCRQTEKLAPGCEKYNLFESSIRKALPPAPETKKRRPPPPIPLEEEDNSEEIVVAMYDFQAAEGHDLRLERGQEYLILEKNDVHWWRARDKYGNEGYIPSNYVTGKKSNNLDQYEWYCRNMNRSKAEQLLRSEDKEGGFMVRDSSQPGLYTVSLYTKFGGEGSSGFRHYHIKETTTSPKKYYLAEKHAFGSIPEIIEYHKHNAAGLVTRLRYPVSVKGKNAPTTAGFSYEKWEINPSELTFMRELGSGLFGVVRLGKWRAQYKVAIKAIREGAMCEEDFIEEAKVMMKLTHPKLVQLYGVCTQQKPIYIVTEFMERGCLLNFLRQRQGHFSRDVLLSMCQDVCEGMEYLERNSFIHRDLAARNCLVSEAGVVKVSDFGMARYVLDDQYTSSSGAKFPVKWCPPEVFNYSRFSSKSDVWSFGVLMWEVFTEGRMPFEKYTNYEVVTMVTRGHRLYQPKLASNYVYEVMLRCWQEKPEGRPSFEDLLRTIDELVECEETFGR

SEQ ID NO: 37052 - protein, 100 aa, Homo sapiens
  REGION 1..100: note = ENSP00000424567
MNFNTILEEILIKRSQQKKKTSPLNYKERLFVLTKSMLTYYEGRAEKKYRKGFIDVSKIKCVEIVKNDDGVIPCQNKYPFQSTKQGPVGEEVKRRNKEQQ

SEQ ID NO: 37053 - protein, 51 aa, Homo sapiens
  REGION 1..51: note = ENSP00000424365
MRELGSGLFGVVRLGKWRAQYKVAIKAIREGAMCEEDFIEEAKVMMLPEIV

SEQ ID NO: 37054 - protein, 976 aa, Homo sapiens
  REGION 1..976: note = ENSP00000430686
MDSLASLVLCGVSLLLSASFLPATLTMTVDKGDNVNISFKKVLIKEEDAVIYKNGSFIHSVPRHEVPDILEVHLPHAQPQDAGVYSARYIGGNLFTSAFTRLIVRRCEAQKWGPECNHLCTACMNNGVCHEDTGECICPPGFMGRTCEKACELHTFGRTCKERCSGQEGCKSYVFCLPDPYGCSCATGWKGLQCNEGIQRMTPKIVDLPDHIEVNSGKFNPICKASGWPLPTNEEMTLVKPDGTVLHPKDFNHTDHFSVAIFTIHRILPPDSGVWVCSVNTVAGMVEKPFNISVKVLPKPLNAPNVIDTGHNFAVINISSEPYFGDGPIKSKKLLYKPVNHYEAWQHIQVTNEIVTLNYLEPRTEYELCVQLVRRGEGGEGHPGPVRRFTTASIGLPPPRGLNLLPKSQTTLNLTWQPIFPSSEDDFYVEVERRSVQKSDQQNIKVPGNLTSVLLNNLHPREQYVVRARVNTKAQGEWSEDLTAWTLSDILPPQPENIKISNITHSSAVISWTILDGYSISSITIRYKVQGKNEDQHVDVKIKNATITQYQLKGLEPETAYQVDIFAENNIGSSNPAFSHELVTLPESQAPADLGGGKMLLIAILGSAGMTCLTVLLAFLIILQLKRANVQRRMAQAFQNREEPAVQFNSGTLALNRKVKNNPDPTIYPVLDWNDIKFQDVIGEGNFGQVLKARIKKDGLRMDAAIKRMKEYASKDDHRDFAGELEVLCKLGHHPNIINLLGACEHRGYLYLAIEYAPHGNLLDFLRKSRVLETDPAFAIANSTASTLSSQQLLHFAADVARGMDYLSQKQFIHRDLAARNILVGENYVAKIADFGLSRGQEVYVKKTMGRLPVRWMAIESLNYSVYTTNSDVWSYGVLLWEIVSLGGTPYCGMTCAELYEKLPQGYRLEKPLNCDDEVYDLMRQCWREKPYERPSFAQILVSLNRMLEERKTYVNTTLYEKFTYAGIDCSAEEAA

SEQ ID NO: 37055 - protein, 1124 aa, Homo sapiens
  REGION 1..1124: note = ENSP00000369375
MDSLASLVLCGVSLLLSGTVEGAMDLILINSLPLVSDAETSLTCIASGWRPHEPITIGRDFEALMNQHQDPLEVTQDVTREWAKKVVWKREKASKINGAYFCEGRVRGEAIRIRTMKMRQQASFLPATLTMTVDKGDNVNISFKKVLIKEEDAVIYKNGSFIHSVPRHEVPDILEVHLPHAQPQDAGVYSARYIGGNLFTSAFTRLIVRRCEAQKWGPECNHLCTACMNNGVCHEDTGECICPPGFMGRTCEKACELHTFGRTCKERCSGQEGCKSYVFCLPDPYGCSCATGWKGLQCNEACHPGFYGPDCKLRCSCNNGEMCDRFQGCLCSPGWQGLQCEREGIQRMTPKIVDLPDHIEVNSGKFNPICKASGWPLPTNEEMTLVKPDGTVLHPKDFNHTDHFSVAIFTIHRILPPDSGVWVCSVNTVAGMVEKPFNISVKVLPKPLNAPNVIDTGHNFAVINISSEPYFGDGPIKSKKLLYKPVNHYEAWQHIQVTNEIVTLNYLEPRTEYELCVQLVRRGEGGEGHPGPVRRFTTASIGLPPPRGLNLLPKSQTTLNLTWQPIFPSSEDDFYVEVERRSVQKSDQQNIKVPGNLTSVLLNNLHPREQYVVRARVNTKAQGEWSEDLTAWTLSDILPPQPENIKISNITHSSAVISWTILDGYSISSITIRYKVQGKNEDQHVDVKIKNATITQYQLKGLEPETAYQVDIFAENNIGSSNPAFSHELVTLPESQAPADLGGGKMLLIAILGSAGMTCLTVLLAFLIILQLKRANVQRRMAQAFQNVREEPAVQFNSGTLALNRKVKNNPDPTIYPVLDWNDIKFQDVIGEGNFGQVLKARIKKDGLRMDAAIKRMKEYASKDDHRDFAGELEVLCKLGHHPNIINLLGACEHRGYLYLAIEYAPHGNLLDFLRKSRVLETDPAFAIANSTASTLSSQQLLHFAADVARGMDYLSQKQFIHRDLAARNILVGENYVAKIADFGLSRGQEVYVKKTMGRLPVRWMAIESLNYSVYTTNSDVWSYGVLLWEIVSLGGTPYCGMTCAELYEKLPQGYRLEKPLNCDDEVYDLMRQCWREKPYERPSFAQILVSLNRMLEERKTYVNTTLYEKFTYAGIDCSAEEAA

SEQ ID NO: 37056 - protein, 1081 aa, Homo sapiens
  REGION 1..1081: note = ENSP00000383977
MDSLASLVLCGVSLLLSGTVEGAMDLILINSLPLVSDAETSLTCIASGWRPHEPITIGRDFEALMNQHQDPLEVTQDVTREWAKKVVWKREKASKINGAYFCEGRVRGEAIRIRTMKMRQQASFLPATLTMTVDKGDNVNISFKKVLIKEEDAVIYKNGSFIHSVPRHEVPDILEVHLPHAQPQDAGVYSARYIGGNLFTSAFTRLIVRRCEAQKWGPECNHLCTACMNNGVCHEDTGECICPPGFMGRTCEKACELHTFGRTCKERCSGQEGCKSYVFCLPDPYGCSCATGWKGLQCNEGIQRMTPKIVDLPDHIEVNSGKFNPICKASGWPLPTNEEMTLVKPDGTVLHPKDFNHTDHFSVAIFTIHRILPPDSGVWVCSVNTVAGMVEKPFNISVKVLPKPLNAPNVIDTGHNFAVINISSEPYFGDGPIKSKKLLYKPVNHYEAWQHIQVTNEIVTLNYLEPRTEYELCVQLVRRGEGGEGHPGPVRRFTTASIGLPPPRGLNLLPKSQTTLNLTWQPIFPSSEDDFYVEVERRSVQKSDQQNIKVPGNLTSVLLNNLHPREQYVVRARVNTKAQGEWSEDLTAWTLSDILPPQPENIKISNITHSSAVISWTILDGYSISSITIRYKVQGKNEDQHVDVKIKNATITQYQLKGLEPETAYQVDIFAENNIGSSNPAFSHELVTLPESQAPADLGGGKMLLIAILGSAGMTCLTVLLAFLIILQLKRANVQRRMAQAFQNVREEPAVQFNSGTLALNRKVKNNPDPTIYPVLDWNDIKFQDVIGEGNFGQVLKARIKKDGLRMDAAIKRMKEYASKDDHRDFAGELEVLCKLGHHPNIINLLGACEHRGYLYLAIEYAPHGNLLDFLRKSRVLETDPAFAIANSTASTLSSQQLLHFAADVARGMDYLSQKQFIHRDLAARNILVGENYVAKIADFGLSRGQEVYVKKTMGRLPVRWMAIESLNYSVYTTNSDVWSYGVLLWEIVSLGGTPYCGMTCAELYEKLPQGYRLEKPLNCDDEVYDLMRQCWREKPYERPSFAQILVSLNRMLEERKTYVNTTLYEKFTYAGIDCSAEEAA

SEQ ID NO: 37057 - protein, 468 aa, Homo sapiens
  REGION 1..468: note = ENSP00000428337
MDSLASLVLCGVSLLLSVPRHEVPDILEVHLPHAQPQDAGVYSARYIGGNLFTSAFTRLIVRRCEAQKWGPECNHLCTACMNNGVCHEDTGECICPPGFMGRTCEKACELHTFGRTCKERCSGQEGCKSYVFCLPDPYGCSCATGWKGLQCNEGIQRMTPKIVDLPDHIEVNSGKFNPICKASGWPLPTNEEMTLVKPDGTVLHPKDFNHTDHFSVAIFTIHRILPPDSGVWVCSVNTVAGMVEKPFNISVKVLPKPLNAPNVIDTGHNFAVINISSEPYFGDGPIKSKKLLYKPVNHYEAWQHIQVTNEIVTLNYLEPRTEYELCVQLVRRGEGGEGHPGPVRRFTTASIGLPPPRGLNLLPKSQTTLNLTWQPIFPSSEDDFYVEVERRSVQKSDQQNIKVPGNLTSVLLNNLHPREQYVVRARVNTKAQGEWSEDLTAWTLSDILPPQPENIKISNITHSSAVIS

SEQ ID NO: 37058 - protein, 468 aa, Homo sapiens
  REGION 1..468: note = ENSP00000480251
MDSLASLVLCGVSLLLSGTVEGAMDLILINSLPLVSDAETSLTCIASGWRPHEPITIGRDFEALMNQHQDPLEVTQDVTREWAKKVVWKREKASKINGAYFCEGRVRGEAIRIRTMKMRQQASFLPATLTMTVDKGDNVNISFKKVLIKEEDAVIYKNGSFIHSVPRHEVPDILEVHLPHAQPQDAGVYSARYIGGNLFTSAFTRLIVRRCEAQKWGPECNHLCTACMNNGVCHEDTGECICPPGFMGRTCEKACELHTFGRTCKERCSGQEGCKSYVFCLPDPYGCSCATGWKGLQCNEGIQRMTPKIVDLPDHIEVNSGKFNPICKASGWPLPTNEEMTLVKPDGTVLHPKDFNHTDHFSVAIFTIHRILPPDSGVWVCSVNTVAGMVEKPFNISVKVLPKPLNAPNVIDTGHNFAVINISSEPYFGDGPIKSKKLLYKPVNHYEAWQHIQVSMEKQRLTKANSDK

SEQ ID NO: 37059 - protein, 421 aa, Homo sapiens
  REGION 1..421: note = ENSP00000350937
MDLENKVKKMGLGHEQGFGAPCLKCKEKCEGFELHFWRKICRNCKCGQEEHDVLLSNEEDRKVGKLFEDTKYTTLIAKLKSDGIPMYKRNVMILTNPVAAKKNVSINTVTYEWAPPVQNQALARQYMQMLPKEKQPVAGSEGAQYRKKQLAKQLPAHDQDPSKCHELSPREVKEMEQFVKKYKSEALGVGDVKLPCEMDAQGPKQMNIPGGDRSTPAAVGAMEDKSAEHKRTQYSCYCCKLSMKEGDPAIYAERAGYDKLWHPACFVCSTCHELLVDMIYFWKNEKLYCGRHYCDSEKPRCAGCDELIFSNEYTQAENQNWHLKHFCCFDCDSILAGEIYVMVNDKPVCKPCYVKNHAVVCQGCHNAIDPEVQRVTYNNFSWHASTECFLCSCCSKCLIGQKFMPVEGMVFCSVECKKRMS

SEQ ID NO: 37060 - protein, 79 aa, Homo sapiens
  REGION 1..79: note = ENSP00000413002
MYKRNVMILTNPVAAKKNVSINTVTYEWAPPVQNQALARQYMQMLPKEKQPVAGSEGAQYRKKQLAKQLPAHDQDPSKC

SEQ ID NO: 37061 - protein, 44 aa, Homo sapiens
  REGION 1..44: note = ENSP00000420220
MDLENKVKKMGLGHEQGFGAPCLKCKEKCEGFELHFWSPAIAAN

SEQ ID NO: 37062 - protein, 412 aa, Homo sapiens
  REGION 1..412: note = ENSP00000377121
MGLGHEQGFGAPCLKCKEKCEGFELHFWRKICRNCKCGQEEHDVLLSNEEDRKVGKLFEDTKYTTLIAKLKSDGIPMYKRNVMILTNPVAAKKNVSINTVTYEWAPPVQNQALARQYMQMLPKEKQPVAGSEGAQYRKKQLAKQLPAHDQDPSKCHELSPREVKEMEQFVKKYKSEALGVGDVKLPCEMDAQGPKQMNIPGGDRSTPAAVGAMEDKSAEHKRTQYSCYCCKLSMKEGDPAIYAERAGYDKLWHPACFVCSTCHELLVDMIYFWKNEKLYCGRHYCDSEKPRCAGCDELIFSNEYTQAENQNWHLKHFCCFDCDSILAGEIYVMVNDKPVCKPCYVKNHAVVCQGCHNAIDPEVQRVTYNNFSWHASTECFLCSCCSKCLIGQKFMPVEGMVFCSVECKKRMS

SEQ ID NO: 37063 - protein, 192 aa, Homo sapiens
  REGION 1..192: note = ENSP00000377124
  VARIANT 1: note = Any amino acid
XTPAAVGAMEDKSAEHKRTQYSCYCCKLSMKEGDPAIYAERAGYDKLWHPACFVCSTCHELLVDMIYFWKNEKLYCGRHYCDSEKPRCAGCDELIFSNEYTQAENQNWHLKHFCCFDCDSILAGEIYVMVNDKPVCKPCYVKNHAVVRSVLRIWLPQPALGLEFMLFLKPLTNGKQKAVLLSRKQIIPTTGC

SEQ ID NO: 37064 - protein, 163 aa, Homo sapiens
  REGION 1..163: note = ENSP00000432716
MGAAHSASEEVRELEGKTGFSSDQIEQLHRRFKQLSGDQPTIRKENFNNVPDLELNPIRSKIVRAFFDNRNLRKGPSGLADEINFEDFLTIMSYFRPIDTTMDEEQVELSRKEKLRFLFHMYDSDSDGRITLEEYRNVKWSRSCCRETLTSRRSPLAPSPTGP

SEQ ID NO: 37065 - protein, 214 aa, Homo sapiens
  REGION 1..214: note = ENSP00000334785
MGAAHSASEEVRELEGKTGFSSDQIEQLHRRFKQLSGDQPTIRKENFNNVPDLELNPIRSKIVRAFFDNRNLRKGPSGLADEINFEDFLTIMSYFRPIDTTMDEEQVELSRKEKLRFLFHMYDSDSDGRITLEEYRNVVEELLSGNPHIEKESARSIADGAMMEAASVCMGQMEPDQVYEGITFEDFLKIWQGIDIETKMHVRFLNMETMALCH

SEQ ID NO: 37066 - protein, 81 aa, Homo sapiens
  REGION 1..81: note = ENSP00000450386
PHVRLGQRRPHHSGRISKCKVVEELLSGNPHIEKESARSIADGAMMEAASVCMGQMIWQGIDIETKMHVRFLNMETMALCH

SEQ ID NO: 37067 - protein, 135 aa, Homo sapiens
  REGION 1..135: note = ENSP00000432608
MGAAHSASEEVRELEGKTGFSSDQIEQLHRRFKQLSGDQPTIRKENFNNVPDLELNPIRSKIVRAFFDNRNLRKGPSGLADEINFEDFLTIMSYFRPIDTTMDEEQVELSRKEKLRSCGFLGLEGGCAVDVKQGP

SEQ ID NO: 37068 - protein, 187 aa, Homo sapiens
  REGION 1..187: note = ENSP00000445689
MGAAHSASEEVRELEGKTGFSSDQIEQLHRRFKQLSGDQPTIRNLRKGPSGLADEINFEDFLTIMSYFRPIDTTMDEEQVELSRKEKLRFLFHMYDSDSDGRITLEEYRNVVEELLSGNPHIEKESARSIADGAMMEAASVCMGQMEPDQVYEGITFEDFLKIWQGIDIETKMHVRFLNMETMALCH

SEQ ID NO: 37069 - protein, 1491 aa, Homo sapiens
  REGION 1..1491: note = ENSP00000374584
MSRAVRLPVPCPVQLGTLRNDSLEAQLHEYVKQGNYVKVKKILKKGIYVDAVNSLGQTALFVAALLGLRKFVDVLVDYGSDPNHRCFDGSTPVHAAAFSGNQWILSKLLDAGGDLRLHDERGQNPKTWALTAGKERSTQIVEFMQRCASHMQAIIQGFSYDLLKKIDSPQRLVYSPSWCGGLVQGNPNGSPNRLLKAGVISAQNIYSFGFGKFYLTGATQMAYLGSLPVIGEKEVIQADDEPTFSFFSGPYMVMTNLVWNGSRVTVKELNLPTHPHCSRLRLADLLIAEQEHSSKLRHPYLLQLMAVCLSQDLEKTRLVYERITIGTLFSVLHERRSQFPVLHMEVIVHLLLQISDALRYLHFQGFIHRSLSSYAVHIISPGEARLTNLEYMLESEDRGVQRDLTRVPLPTQLYNWAAPEVILQKAATVKSDIYSFSMIMQEILTDDIPWKGLDGSVVKKAVVSGNYLEADVRLPKPYYDIVKSGIHVKQKDRTMNLQDIRYILKNDLKDFTGAQRTQPTESPRVQRYGLHPDVNVYLGLTSEHPRETPDMEIIELKEMGSQPHSPRVHSLFTEGTLDPQAPDPCLMARETQNQDAPCPAPFMAEEASSPSTGQPSLCSFEINEIYSGCLILEDDIEEPPGAASSLEADGPNQVDELKSMEEELDKMEREACCFGSEDESSSKAETEYSFDDWDWQNGSLSSLSLPESTREAKSNLNNMSTTEEYLISKCVLDLKIMQTIMHENDDRLRNIEQILDEVEMKQKEQEERMSLWATSREFTNAYKLPLAVGPPSLNYIPPVLQLSGGQKPDTSGNYPTLPRFPRMLPTLCDPGKQNTDEQFQCTQGAKDSLETSRIQNTSSQGRPRESTAQAKATQFNSALFTLSSHRQGPSASPSCHWDSTRMSVEPVSSEIYNAESRNKDDGKVHLKWKMEVKEMAKKAATGQLTVPPWHPQSSLTLESEAENEPDALLQPPIRSPENTDWQRVIEYHRENDEPRGNGKFDKTGNNDCDSDQHGRQPRLGSFTSIRHPSPRQKEQPEHSEAFQASSDTLVAVEKSYSHQSMQSTCSPESSEDITDEFLTPDGEYFYSSTAQENLALETSSPIEEDFEGIQGAFAQPQVSGEEKFQMRKILGKNAEILPRSQFQPVRSTEDEQEETSKESPKELKEKDISLTDIQDLSSISYEPDSSFKEASCKTPKINHAPTSVSTPLSPGSVSSAASQYKDCLESITFQVKTEFASCWNSQEFIQTLSDDFISVRERAKKLDSLLTSSETPPSRLTGLKRLSSFIGAGSPSLVKACDSSPPHATQRRSLPKVEAFSQHHIDELPPPSQELLDDIELLKQQQGSSTVLHENTASDGGGTANDQRHLEEQETDSKKEDSSMLLSKETEDLGEDTERAHSTLDEDLERWLQPPEESVELQDLPKGSERETNIKDQKVGEEKRKREDSITPERRKSEGVLGTSEEDELKSCFWKRLGWSESSRIIVLDQSDLSD

SEQ ID NO: 37070 - protein, 1497 aa, Homo sapiens
  REGION 1..1497: note = ENSP00000240361
MSRAVRLPVPCPVQLGTLRNDSLEAQLHEYVKQGNYVKVKKILKKGIYVDAVNSLGQTALFVAALLGLRKFVDVLVDYGSDPNHRCFDGSTPVHAAAFSGNQWILSKLLDAGGDLRLHDERGQNPKTWALTAGKERSTQIVEFMQRCASHMQAIIQGFSYDLLKKIDSPQRLVYSPSWCGGLVQGNPNGSPNRLLKAGVISAQNIYSFGFGKAMPWFQFYLTGATQMAYLGSLPVIGEKEVIQADDEPTFSFFSGPYMVMTNLVWNGSRVTVKELNLPTHPHCSRLRLADLLIAEQEHSSKLRHPYLLQLMAVCLSQDLEKTRLVYERITIGTLFSVLHERRSQFPVLHMEVIVHLLLQISDALRYLHFQGFIHRSLSSYAVHIISPGEARLTNLEYMLESEDRGVQRDLTRVPLPTQLYNWAAPEVILQKAATVKSDIYSFSMIMQEILTDDIPWKGLDGSVVKKAVVSGNYLEADVRLPKPYYDIVKSGIHVKQKDRTMNLQDIRYILKNDLKDFTGAQRTQPTESPRVQRYGLHPDVNVYLGLTSEHPRETPDMEIIELKEMGSQPHSPRVHSLFTEGTLDPQAPDPCLMARETQNQDAPCPAPFMAEEASSPSTGQPSLCSFEINEIYSGCLILEDDIEEPPGAASSLEADGPNQVDELKSMEEELDKMEREACCFGSEDESSSKAETEYSFDDWDWQNGSLSSLSLPESTREAKSNLNNMSTTEEYLISKCVLDLKIMQTIMHENDDRLRNIEQILDEVEMKQKEQEERMSLWATSREFTNAYKLPLAVGPPSLNYIPPVLQLSGGQKPDTSGNYPTLPRFPRMLPTLCDPGKQNTDEQFQCTQGAKDSLETSRIQNTSSQGRPRESTAQAKATQFNSALFTLSSHRQGPSASPSCHWDSTRMSVEPVSSEIYNAESRNKDDGKVHLKWKMEVKEMAKKAATGQLTVPPWHPQSSLTLESEAENEPDALLQPPIRSPENTDWQRVIEYHRENDEPRGNGKFDKTGNNDCDSDQHGRQPRLGSFTSIRHPSPRQKEQPEHSEAFQASSDTLVAVEKSYSHQSMQSTCSPESSEDITDEFLTPDGEYFYSSTAQENLALETSSPIEEDFEGIQGAFAQPQVSGEEKFQMRKILGKNAEILPRSQFQPVRSTEDEQEETSKESPKELKEKDISLTDIQDLSSISYEPDSSFKEASCKTPKINHAPTSVSTPLSPGSVSSAASQYKDCLESITFQVKTEFASCWNSQEFIQTLSDDFISVRERAKKLDSLLTSSETPPSRLTGLKRLSSFIGAGSPSLVKACDSSPPHATQRRSLPKVEAFSQHHIDELPPPSQELLDDIELLKQQQGSSTVLHENTASDGGGTANDQRHLEEQETDSKKEDSSMLLSKETEDLGEDTERAHSTLDEDLERWLQPPEESVELQDLPKGSERETNIKDQKVGEEKRKREDSITPERRKSEGVLGTSEEDELKSCFWKRLGWSESSRIIVLDQSDLSD

SEQ ID NO: 37071 - protein, 1451 aa, Homo sapiens
  REGION 1..1451: note = ENSP00000268910
MSRAVRLPVPCPVQLGTLRNDSLEAQLHEYVKQGNYVKVKKILKKGIYVDAVNSLGQTALFVAALLGLRKFVDVLVDYGSDPNHRCFDGSTPVHAAAFSGNQWILSKLLDAGGDLRLHDERGQNPKTWALTAGKERSTQIVEFMQRCASHMQAIIQGFSYDLLKKIDSPQRLVYSPSWCGGLVQGNPNGSPNRLLKAGVISAQNIYSFGFGKFYLTGATQMAYLGSLPVIGEKEVIQADDEPTFSFFSGPYMVMTNLVWNGSRVTVKELNLPTHPHCSRLRLADLLIAEQEHSSKLRHPYLLQLMAVCLSQDLEKTRLVYERITIGTLFSVLHERRSQFPVLHMEVIVHLLLQISDALRYLHFQGFIHRSLSSYAVHIISPGEARLTNLEYMLESEDRGVQRDLTRVPLPTQLYNWAAPEVILQKAATVKSDIYSFSMIMQEILTDDIPWKGLDGSVVKKAVVSGNYLEADVRLPKPYYDIVKSGIHVKQKDRTMNLQDIRYILKNDLKDFTGAQRTQPTESPRVQRYGLHPDVNVYLGLTSEHPRETPDMEIIELKEMGSQPHSPRVHSLFTEGTLDPQAPDPCLMARETQNQDAPCPAPFMAEEASSPSTGQPSLCSFEINEIYSGCLILEDDIEEPPGAASSLEADGPNQVDELKSMEEELDKMEREACCFGSEDESSSKAETEYSFDDWDWQNGSLSSLSLPESTREAKSNLNNMSTTEEYLISKCVLDLKIMQTIMHENDDRLRNIEQILDEVEMKQKEQEERMSLWATSREFTNAYKLPLAVGPPSLNYIPPVLQLSGGQKPDTSGNYPTLPRFPRMLPTLCDPGKQNTDEQFQCTQGAKDSLETSRIQNTSSQGRPRESTAQAKATQFNSALFTLSSHRQGPSASPSCHWDSTRMSVEPVSSEIYNAESRNKDDGKVHLKWKMEVKEMAKKAATGQLTVPPWHPQSSLTLESEAENEPDALLQPPIRSPENTDWQRVIEYHRENDEPRGNGKFDKTGNNDCDSDQHGRQPRLGSFTSIRHPSPRQKEQPEHSEAFQASSDTLVAVEKSYSTSSPIEEDFEGIQGAFAQPQVSGEEKFQMRKILGKNAEILPRSQFQPVRSTEDEQEETSKESPKELKEKDISLTDIQDLSSISYEPDSSFKEASCKTPKINHAPTSVSTPLSPGSVSSAASQYKDCLESITFQVKTEFASCWNSQEFIQTLSDDFISVRERAKKLDSLLTSSETPPSRLTGLKRLSSFIGAGSPSLVKACDSSPPHATQRRSLPKVEAFSQHHIDELPPPSQELLDDIELLKQQQGSSTVLHENTASDGGGTANDQRHLEEQETDSKKEDSSMLLSKETEDLGEDTERAHSTLDEDLERWLQPPEESVELQDLPKGSERETNIKDQKVGEEKRKREDSITPERRKSEGVLGTSEEDELKSCFWKRLGWSESSRIIVLDQSDLSD

SEQ ID NO: 37072 - protein, 66 aa, Homo sapiens
  REGION 1..66: note = ENSP00000463593
MSRAVRLPVPCPVQLGTLRNDSLEAQLHEYVKQGNYVKVKKILKKALELPQTALRSEEEWRSKEEN

SEQ ID NO: 37073 - protein, 152 aa, Homo sapiens
  REGION 1..152: note = ENSP00000463243
  VARIANT 1: note = Any amino acid
XKEASCKTPKINHAPTSVSTPLSPGSVSSAASQYKDCLESITFQVKTEFASCWNSQEFIQTLSDDFISVRERAKKLDSLLTSSETPPSRLTGLKRLSSFIGAGSPSLVKACDSSPPHATQRRSLPKVEAFSQHHIDELPPPSQELLDDIVAV

SEQ ID NO: 37074 - protein, 1134 aa, Homo sapiens
  REGION 1..1134: note = ENSP00000258991
MTSLYGRHAEKTTDMPKPSAPKVHVQRSVSRDTIAIHFSASGEEEEEEEEEFREYFEEGLDDQSIVTGLEAKEDLYLEPQVGHDPAGPAASPVLADGLSVSQAPAILPVSKNTVKLLESPVPAAQVLSTVPLAVSPGSSSSGPLASSPSVSSLSEQKTSSSSPLSSPSKSPILSSSASTSTLSSAKPFMSLVKSLSTEVEPKESPHPARHRHLMKTLVKSLSTDTSRQESDTVSYKPPDSKLNLHLFKQFTQPRNTGGDSKTAPSSPLTSPSDTRSFFKVPEMEAKIEDTKRRLSEVIYEPFQLLSKIIGEESGSHRPKALSSSASELSNLSSLNGHLESNNNYSIKEEECDSEGDGYGSDSNIPRSDHPKSTGEPTREIELKSSQGSSLKDLGLKTSSLVLEKCSLSALVSKEDEEFCELYTEDFDLETEGESKVDKLSDIPLKPEVLAEDGVVLDSEDEVDSAVQHPELPVKTLGFFIMCVYVYLILPLPHYVSGLFLGIGLGFMTAVCVIWFFTPPSAHKYHKLHKNLRHWNTRSLDIKEPEILKGWMNEIYNYDPETYHATLTHSVFVRLEGGTLRLSKPNKNISRRASYNEPKPEVTYISQKIYDLSDSKIYLVPKTLARKRIWNKKYPICIELGQQDDFMSKAQTDKETSEEKPPAEGSEDPKKPPRPQEGTRSSQRDQILYLFGRTGREKEEWFRRFILASKLKSEIKKSSGVSGGKPAPVFLAPGLLPAHSRHNSPSGHLTHSRSSSKGSVEEIMSQPKQKELAGSVRQKMLLDYSVYMGRCVPQESRSPQRSPLQSAESSPTAGKKLPEVPPSEEEEQEAWVNALLGRIFWDFLGEKYWSDLVSKKIQMKLSKIKLPYFMNELTLTELDMGVAVPKILQAFKPYVDHQGLWIDLEMSYNGSFLMTLETKMNLTKLGKEPLVEALKVGEIGKEGCRPRAFCLADSDEESSSAGSSEEDDAPEPSGGDKQLLPGAEGYVGGHRTSKIMRFVDKITKSKYFQKATETEFIKKKIEEVSNTPLLLTVEVQECRGTLAVNIPPPPTDRVWYGFRKPPHVELKARPKLGEREVTLVHVTDWIEKKLEQEFQKVFVMPNMDDVYITIMHSAMDPRSTSCLLKDPPVEAADQP

SEQ ID NO: 37075 - protein, 1127 aa, Homo sapiens
  REGION 1..1127: note = ENSP00000462665
MTSLYGRHAEKTTDMPKPSAPKVHVQRSVSRDTIAIHFSASGEEEEEEEEEFREYFEEGLDDQSIVTGLEAKEDLYLEPQVGHDPAGPAASPVLADGLSVSQAPAILPVSKNTVKLLESPVPAAQVLSTVPLAVSPGSSSSGPLASSPSVSSLSEQKTSSSSPLSSPSKSPILSSSASTSTLSSAKPFMSLVKSLSTEVEPKESPHPARHRHLMKTLVKSLSTDTSRQESDTVSYKPPDSKLNLHLFKQFTQPRNTGGDSKTAPSSPLTSPSDTRSFFKVPEMEAKIEDTKRRLSEVIYEPFQLLSKIIGEESGSHRPKALSSSASELSNLSSLNGHLESNNNYSIKEEECDSEGDGYGSDSNIPRSDHPKSTGEPTREIELKSSQGSSLKDLGLKTSSLVLEKCSLSALVSKEDEEFCELYTEDFDLETEGESKVDKLSDIPLKPEVLAEDGVVLDSEDEVDSAVQHPELPVKTLGFFIMCVYVYLILPLPHYVSGLFLGIGLGFMTAVCVIWFFTPPSAHKYHKLHKNLRHWNTRSLDIKEPEILKGWMNEIYNYDPETYHATLTHSVFVRLEGGTLRLSKPNKNISRRASYNEPKPEVTYISQKIYDLSDSKIYLVPKTLARKRIWNKKYPICIELGQQDDFMSKAQTDKETSEEKPPAEGSEDPKKPPRPQEGTRSSQRDQILYLFGRTGREKEEWFRRFILASKLKSEIKKSSGVSGGKPGLLPAHSRHNSPSGHLTHSRSSSKGSVEEIMSQPKQKELAGSVRQKMLLDYSVYMGRCVPQESRSPQRSPLQSAESSPTAGKKLPEVPPSEEEEQEAWVNALLGRIFWDFLGEKYWSDLVSKKIQMKLSKIKLPYFMNELTLTELDMGVAVPKILQAFKPYVDHQGLWIDLEMSYNGSFLMTLETKMNLTKLGKEPLVEALKVGEIGKEGCRPRAFCLADSDEESSSAGSSEEDDAPEPSGGDKQLLPGAEGYVGGHRTSKIMRFVDKITKSKYFQKATETEFIKKKIEEVSNTPLLLTVEVQECRGTLAVNIPPPPTDRVWYGFRKPPHVELKARPKLGEREVTLVHVTDWIEKKLEQEFQKVFVMPNMDDVYITIMHSAMDPRSTSCLLKDPPVEAADQP

SEQ ID NO: 37076 - protein, 1127 aa, Homo sapiens; identical to SEQ ID NO: 37075
  REGION 1..1127: note = ENSP00000463001

SEQ ID NO: 37077 - protein, 626 aa, Homo sapiens
  REGION 1..626: note = ENSP00000462230
  VARIANT 1: note = Any amino acid
XGIGLGFMTAVCVIWFFTPPSAHKYHKLHKNLRHWNTRSLDIKEPEILKGWMNEIYNYDPETYHATLTHSVFVRLEGGTLRLSKPNKNISRRASYNEPKPEVTYISQKIYDLSDSKIYLVPKTLARKRIWNKKYPICIELGQQDDFMSKAQTDKETSEEKPPAEGSEDPKKPPRPQEGTRSSQRDQILYLFGRTGREKEEWFRRFILASKLKSEIKKSSGVSGGKPGLLPAHSRHNSPSGHLTHSRSSSKGSVEEIMSQPKQKELAGSVRQKMLLDYSVYMGRCVPQESRSPQRSPLQSAESSPTAGKKLPEVPPSEEEEQEAWVNALLGRIFWDFLGEKYWSDLVSKKIQMKLSKIKLPYFMNELTLTELDMGVAVPKILQAFKPYVDHQGLWIDLEMSYNGSFLMTLETKMNLTKLGKEPLVEALKVGEIGKEGPRAFCLADSDEESSSAGSSEEDDAPEPSGGDKQLLPGAEGYVGGHRTSKIMRFVDKITKSKYFQKATETEFIKKKIEEVSNTPLLLTVEVQECRGTLAVNIPPPPTDRVWYGFRKPPHVELKARPKLGEREVTLVHVTDWIEKKLEQEFQKVFVMPNMDDVYITIMHSAMDPRSTSCLLKDPPVEAADQP

SEQ ID NO: 37078 - protein, 52 aa, Homo sapiens
  REGION 1..52: note = ENSP00000463286
MTSLYGRHAEKTTDMPKPSAPKVHVQRSVSRDTIAIHFSASGEEEEEEEEEF

SEQ ID NO: 37079 - protein, 42 aa, Homo sapiens
  REGION 1..42: note = ENSP00000462210
MTSLYGRHAEKTTDMPKPSAPKVHVQRSVSRDTIAIHFSASG

SEQ ID NO: 37080 - protein, 1127 aa, Homo sapiens [sequence omitted]

SEQ ID NO: 37081 - protein, 129 aa, Homo sapiens
  REGION 1..129: note = ENSP00000431764
MTKGRRFNPPSDKDGRWFPHIGLTQKTPESITSATSKEPQSPHLPRQAEGKLPPIYKVREKQAVNNQFPFSVHDNRHSLENSGCYLDSERMTATDPQGEPDKRQEFYEPVRTQSIPHPGLRTNAPLLAV

SEQ ID NO: 37082 - protein, 99 aa, Homo sapiens
  REGION 1..99: note = ENSP00000434299
MTKGRRFNPPSDKDGRWFPHIGLTQKTPESITSATSKEPQSPHLPRQAEGKLPPIYKVREKQAVNNQFPFSVHDNRHSLENSGCYLDSFADGLSWDFSL

SEQ ID NO: 37083 - protein, 186 aa, Homo sapiens
  REGION 1..186: note = ENSP00000357811
MTKGRRFNPPSDKDGRWFPHIGLTQKTPESITSATSKEPQSPHLPRQAEGKLPPIYKVREKQAVNNQFPFSVHDNRHSLENSGCYLDSGLGRKKISPDKRQHVSRNFNLWACDYVPSCLDGFSNNQISYVYKEAMVVSSFRRFPRCYKEIWNAFTFLPERSYTEVLKKKPKVRFTVDKKVVSSLES

SEQ ID NO: 37084 - protein, 104 aa, Homo sapiens
  REGION 1..104: note = ENSP00000452791
MKSCDDEDDYSLRGLLPSEGIVHLHSETKPKTKNIDPVNKVQNKLHSANKGRKTNSSVKLKYSDVQTADDVAIPEDFSDFSLAKTISKIEGQLEEEGLPEYIDD

SEQ ID NO: 37085 - protein, 391 aa, Homo sapiens
  REGION 1..391: note = ENSP00000342169
MAGRSLCLTRSSVPGTPFPPPVQQPSTPGPDLLALEEEYKRLNAELQAKTADVVQQAKEIIRDRQEVRSRPVSTQMKSCDDEDDYSLRGLLPSEGIVHLHSETKPKTKNIDPVNKVQNKLHSANKGRKTNSSVKLKYSDVQTADDVAIPEDFSDFSLAKTISKIEGQLEEEGLPEYIDDIFSGVSNDIGTEAQIRFLKAKLHVMQEELDNVVCECNKKEDEIQNLKSQVKNFEEDFMRQQRTINMQQSQVEKYKTLFEEANKKYDGLQQQLSSVERELENKRRLQKQAASSQSATEVRLNRALEEAEKYKLELSKLRQNNKDIANEEHKKIEVLKSENKKLEKQKGELMIGFKKQLKLIDVLKRQKMHIEAAKMLSFTEEEFMKALEWGNS

SEQ ID NO: 37086 - protein, 316 aa, Homo sapiens
  REGION 1..316: note = ENSP00000438745
MKSCDDEDDYSLRGLLPSEGIVHLHSETKPKTKNIDPVNKVQNKLHSANKGRKTNSSVKLKYSDVQTADDVAIPEDFSDFSLAKTISKIEGQLEEEGLPEYIDDIFSGVSNDIGTEAQIRFLKAKLHVMQEELDNVVCECNKKEDEIQNLKSQVKNFEEDFMRQQRTINMQQSQVEKYKTLFEEANKKYDGLQQQLSSVERELENKRRLQKQAASSQSATEVRLNRALEEAEKYKLELSKLRQNNKDIANEEHKKIEVLKSENKKLEKQKGELMIGFKKQLKLIDVLKRQKMHIEAAKMLSFTEEEFMKALEWGNS

SEQ ID NO: 37087 - protein, 283 aa, Homo sapiens
  REGION 1..283: note = ENSP00000456593
MAGRSLCLTRSSVPGTPFPPPVQQPSTPGPDLLALEEEYKRLNAELQAKTADVVQQAKEIIRDRQEVRSRPVSTQMKSCDDEDDYSLRGLLPSEGIVHLHSETKPKTKNIDPVNKVQNKLHSANKGRKTNSSVKLKYSDVQTADDVAIPEDFSDFSLAKTISKIEGQLEEEGLPEYIDDIFSGVSNDIGTEAQIRFLKAKLHVMQEELDNVVCECNKKEDEIQNLKSQVKNFEEDFMRQQRTINMQQSQVEKYKTLFEEANKKYDGLQQQLSSVERVIIWYFS

SEQ ID NO: 37088 - protein, 79 aa, Homo sapiens
  REGION 1..79: note = ENSP00000453431
MAGRSLCLTVSSTPGSWGASGFRRLGRLTSFNFGSESLWLFYREAAFQGLRSRHPFSNPLHLDPTSSPWRKNISKKFGG

SEQ ID NO: 37089 - protein, 208 aa, Homo sapiens
  REGION 1..208: note = ENSP00000453398
MKSCDDEDDYSLRGLLPSEGIVHLHSETKPKTKNIDPVNKVQNKLHSANKGRKTNSSVKLKYSDVQTADDVAIPEDFSDFSLAKTISKIEGQLEEEGLPEYIDDIFSGVSNDIGTEAQIRFLKAKLHVMQEELDNVVCECNKKEDEIQNLKSQVKNFEEDFMRQQRTINMQQSQVEKYKTLFEEANKKYDGLQQQLSSVERVIIWYFS

SEQ ID NO: 37090 - protein, 102 aa, Homo sapiens
  REGION 1..102: note = ENSP00000453960
MQQSQVEKYKTLFEEANKKYDGLQQQLSSVERELENKRRLQKQAASSQSATEVRLNRALEEAEKYKLELSKLRQNNKMHIEAAKMLSFTEEEFMKALEWGNS

SEQ ID NO: 37091 - protein, 81 aa, Homo sapiens
  REGION 1..81: note = ENSP00000417735
  VARIANT 1: note = Any amino acid
XYKVTVAEVQRRLSPPECLNASLLGGVLRRAKSKNGGRSLREKLDKIGLNLPAGRRKAANVTLLTSLVEGAEMAAVLRQEY

SEQ ID NO: 37092 - protein, 439 aa, Homo sapiens
  REGION 1..439: note = ENSP00000368933
MKMLWKLTDNIKYEDCEDRHDGTSNGTARLPQLGTVGQSPYTSAPPLSHTPNADFQPPYFPPPYQPIYPQSQDPYSHVNDPYSLNPLHAQPQPQHPGWPGQRQSQESGLLHTHRGLPHQLSGLDPRRDYRRHEDLLHGPHALSSGLGDLSIHSLPHAIEEVPHVEDPGINIPDQTVIKKGPVSLSKSNSNAVSAIPINKDNLFGGVVNPNEVFCSVPGRLSLLSSTSKYKVTVAEVQRRLSPPECLNASLLGGVLRRAKSKNGGRSLREKLDKIGLNLPAGRRKAANVTLLTSLVEGEAVHLARDFGYVCETEFPAKAVAEFLNRQHSDPNEQVTRKNMLLATKQICKEFTDLLAQDRSPLGNSRPNPILEPGIQSCLTHFNLISHGFGSPAVCAAVTALQNYLTEALKAMDKMYLSNNPNSHTDNNAKSSDKEEKHRK

SEQ ID NO: 37093 - protein, 113 aa, Homo sapiens
  REGION 1..113: note = ENSP00000420568
MLVHSFSAMDRHDGTSNGTARLPQLGTPEPPARPAAAAAPRLARPEAEPGVWAPAHAPGAASPAVGPGSSQGLQAARGPPARPTRAQLRTRRPLDPLLTSRHRGGPACRRPGY

SEQ ID NO: 37094 - protein, 433 aa, Homo sapiens
  REGION 1..433: note = ENSP00000316516
MSILAKMGDWQDRHDGTSNGTARLPQLGTVGQSPYTSAPPLSHTPNADFQPPYFPPPYQPIYPQSQDPYSHVNDPYSLNPLHAQPQPQHPGWPGQRQSQESGLLHTHRGLPHQLSGLDPRRDYRRHEDLLHGPHALSSGLGDLSIHSLPHAIEEVPHVEDPGINIPDQTVIKKGPVSLSKSNSNAVSAIPINKDNLFGGVVNPNEVFCSVPGRLSLLSSTSKYKVTVAEVQRRLSPPECLNASLLGGVLRRAKSKNGGRSLREKLDKIGLNLPAGRRKAANVTLLTSLVEGEAVHLARDFGYVCETEFPAKAVAEFLNRQHSDPNEQVTRKNMLLATKQICKEFTDLLAQDRSPLGNSRPNPILEPGIQSCLTHFNLISHGFGSPAVCAAVTALQNYLTEALKAMDKMYLSNNPNSHTDNNAKSSDKEEKHRK

SEQ ID NO: 37095 - protein, 431 aa, Homo sapiens
  REGION 1..431: note = ENSP00000368928
MLVHSFSAMDRHDGTSNGTARLPQLGTVGQSPYTSAPPLSHTPNADFQPPYFPPPYQPIYPQSQDPYSHVNDPYSLNPLHAQPQPQHPGWPGQRQSQESGLLHTHRGLPHQLSGLDPRRDYRRHEDLLHGPHALSSGLGDLSIHSLPHAIEEVPHVEDPGINIPDQTVIKKGPVSLSKSNSNAVSAIPINKDNLFGGVVNPNEVFCSVPGRLSLLSSTSKYKVTVAEVQRRLSPPECLNASLLGGVLRRAKSKNGGRSLREKLDKIGLNLPAGRRKAANVTLLTSLVEGEAVHLARDFGYVCETEFPAKAVAEFLNRQHSDPNEQVTRKNMLLATKQICKEFTDLLAQDRSPLGNSRPNPILEPGIQSCLTHFNLISHGFGSPAVCAAVTALQNYLTEALKAMDKMYLSNNPNSHTDNNAKSSDKEEKHRK

SEQ ID NO: 37096 - protein, 121 aa, Homo sapiens
  REGION 1..121: note = ENSP00000419823
MKMLWKLTDNIKYEDCEDRHDGTSNGTARLPQLGTPEPPARPAAAAAPRLARPEAEPGVWAPAHAPGAASPAVGPGSSQGLQAARGPPARPTRAQLRTRRPLDPLLTSRHRGGPACRRPGY

SEQ ID NO: 37097 - protein, 437 aa, Homo sapiens
  REGION 1..437: note = ENSP00000418541
MLWKLTDNIKYEDCEDRHDGTSNGTARLPQLGTVGQSPYTSAPPLSHTPNADFQPPYFPPPYQPIYPQSQDPYSHVNDPYSLNPLHAQPQPQHPGWPGQRQSQESGLLHTHRGLPHQLSGLDPRRDYRRHEDLLHGPHALSSGLGDLSIHSLPHAIEEVPHVEDPGINIPDQTVIKKGPVSLSKSNSNAVSAIPINKDNLFGGVVNPNEVFCSVPGRLSLLSSTSKYKVTVAEVQRRLSPPECLNASLLGGVLRRAKSKNGGRSLREKLDKIGLNLPAGRRKAANVTLLTSLVEGEAVHLARDFGYVCETEFPAKAVAEFLNRQHSDPNEQVTRKNMLLATKQICKEFTDLLAQDRSPLGNSRPNPILEPGIQSCLTHFNLISHGFGSPAVCAAVTALQNYLTEALKAMDKMYLSNNPNSHTDNNAKSSDKEEKHRK

SEQ ID NO: 37098 - protein, 328 aa, Homo sapiens
  REGION 1..328: note = ENSP00000417495
MLWKLTDNIKYEDCEDRHDGTSNGTARLPQLGTVGQSPYTSAPPLSHTPNADFQPPYFPPPYQPIYPQSQDPYSHVNDPYSLNPLHAQPQPQHPGWPGQRQSQESGLLHTHRGLPHQLSGLDPRRDYRRHEDLLHGPHALSSGLGDLSIHSLPHAIEEVPHVEDPGINIPDQTVIKKGPVSLSKSNSNAVSAIPINKDNLFGGVVNPNEVFCSVPGRLSLLSSTSKYKVTVAEVQRRLSPPECLNASLLGGVLRRAKSKNGGRSLREKLDKIGLNLPAGRRKAANVTLLTSLVEDRYAKSSPTCWLRTDLPWGTHGPTPSWSPASRAA

SEQ ID NO: 37099 - protein, 218 aa, Homo sapiens
  REGION 1..218: note = ENSP00000419696
  VARIANT 1: note = Any amino acid
XPGQRQSQESGLLHTHRGLPHQLSGLDPRRDYRRHEDLLHGPHALSSGLGDLSIHSLPHAIEEVPHVEDPGINIPDQTVIKKGPVSLSKSNSNAVSAIPINKDNLFGGVVNPNEVFCSVPGRLSLLSSTSKYKVTVAEVQRRLSPPECLNASLLGGVLRRAKSKNGGRSLREKLDKIGLNLPAGRRKAANVTLLTSLVEGEVVIFPDKCIHQILQRRK

SEQ ID NO: 37100 - protein, 136 aa, Homo sapiens
  REGION 1..136: note = ENSP00000419961
MKMLWKLTDNIKYEDCEHVEDPGINIPDQTVIKKGPVSLSKSNSNAVSAIPINKDNLFGGVVNPNEVFCSVPGRLSLLSSTSKYKVTVAEVQRRLSPPECLNASLLGGVLRRAKSKNGGRSLREKLDKIGLNLPAG

SEQ ID NO: 37101 - protein, 173 aa, Homo sapiens
  REGION 1..173: note = ENSP00000418391
MEEPRSSGQPSPESQTRLRSGGARGQTGPGSACRAESPTSARTRSQAAPTRYARPPLHPEDRHDGTSNGTARLPQLGTVGQSPYTSAPPLSHTPNADFQPPYFPPPYQPIYPQSQDPYSHVNDPYSLNPLHAQPQPQHPGWPGQRQSQESGLLHTHRGLPHQLSGLDPRRDYR

SEQ ID NO: 37102 - protein, 198 aa, Homo sapiens
  REGION 1..198: note = ENSP00000342252
MLWKLVENVKYEDIYEMLVHTYSSMDRHDGVPSHSSRLSQLGSVSQGPYSSAPPLSHTPSSDFQPPYFPPPYQPLPYHQSQDPYSHVNDPYSLNPLHQPQQHPWGQRQRQEVGSEAGSLLPQPRAALPQLSGLDPRRDYHSVRRPDVLLHSAHHGLDAGMGDSLSLHGLGHPGMEDVQSVEDANNSGMNLLDQSVIKK

SEQ ID NO: 37103 - protein, 460 aa, Homo sapiens
  REGION 1..460: note = ENSP00000377265
MHSPPRDQAAIMLWKLVENVKYEDIYEDRHDGVPSHSSRLSQLGSVSQGPYSSAPPLSHTPSSDFQPPYFPPPYQPLPYHQSQDPYSHVNDPYSLNPLHQPQQHPWGQRQRQEVGSEAGSLLPQPRAALPQLSGLDPRRDYHSVRRPDVLLHSAHHGLDAGMGDSLSLHGLGHPGMEDVQSVEDANNSGMNLLDQSVIKKVPVPPKSVTSLMMNKDGFLGGMSVNTGEVFCSVPGRLSLLSSTSKYKVTVGEVQRRLSPPECLNASLLGGVLRRAKSKNGGRSLRERLEKIGLNLPAGRRKAANVTLLTSLVEGEAVHLARDFGYICETEFPAKAVSEYLNRQHTDPSDLHSRKNMLLATKQLCKEFTDLLAQDRTPIGNSRPSPILEPGIQSCLTHFSLITHGFGAPAICAALTALQNYLTEALKGMDKMFLNNTTTNRHTSGEGPGSKTGDKEEKHRK

SEQ ID NO: 37104 - protein, 118 aa, Homo sapiens
  REGION 1..118: note = ENSP00000414015
AAAEVAGQFVIKLTHDVELNLDYERYNSQLLSFVRDLNQYRADIKEMGLSLQWLYSARGDFFRATSRLTTDFGNAEKTDRFVMKKLNDRVMREGPQMMLLLTDARPSNHFLSPLLSLH

SEQ ID NO: 37105 - protein, 679 aa, Homo sapiens
  REGION 1..679: note = ENSP00000390133
MIGYLGYCKGVEPKTECERLAGTESPVREEPGEDFPAARRLYWDDLKRKLSEKLDSTDFTGTIKLLNENSYVPREAGSQKDENLALYVENQFREFKLSKVWRDQHFVKIQVKDSAQNSVIIVDKNGRLVYLVENPGGYVAYSKAATVTGKLVHANFGTKKDFEDLYTPVNGSIVIVRAGKITFAEKVANAESLNAIGVLIYMDQTKFPIVNAELSFFGHAHLGTGDPYTPGFPSFNHTQFPPSRSSGLPNIPVQTISRAAAEKLFGNMEGDCPSDWKTDSTCRMVTSESKNVKLTVSNVLKEIKILNIFGVIKGFVEPDHYVVVGAQRDAWGPGAAKSGVGTALLLKLAQMFSDMVLKDGFQPSRSIIFASWSAGDFGSVGATEWLEGYLSSLHLKAFTYINLDKAVLGTSNFKVSASPLLYTLIEKTMQNVKHPVTGQFLYQDSNWASKVEKLTLDNAAFPFLAYSGIPAVSFCFCEDTDYPYLGTTMDTYKELIERIPELNKVARAAAEVAGQFVIKLTHDVELNLDYERYNSQLLSFVRDLNQYRADIKEMGLSLQWLYSARGDFFRATSRLTTDFGNAEKTDRFVMKKLNDRVMRVEYHFLSPYVSPKESPFRHVFWGSGSHTLPALLENLKLRKQNNGAFNETLFRNQLALATWTIQGAANALSGDVWDIDNEF

SEQ ID NO: 37106 - protein, 760 aa, Homo sapiens
  REGION 1..760: note = ENSP00000353224
MMDQARSAFSNLFGGEPLSYTRFSLARQVDGDNSHVEMKLAVDEEENADNNTKANVTKPKRCSGSICYGTIAVIVFFLIGFMIGYLGYCKGVEPKTECERLAGTESPVREEPGEDFPAARRLYWDDLKRKLSEKLDSTDFTGTIKLLNENSYVPREAGSQKDENLALYVENQFREFKLSKVWRDQHFVKIQVKDSAQNSVIIVDKNGRLVYLVENPGGYVAYSKAATVTGKLVHANFGTKKDFEDLYTPVNGSIVIVRAGKITFAEKVANAESLNAIGVLIYMDQTKFPIVNAELSFFGHAHLGTGDPYTPGFPSFNHTQFPPSRSSGLPNIPVQTISRAAAEKLFGNMEGDCPSDWKTDSTCRMVTSESKNVKLTVSNVLKEIKILNIFGVIKGFVEPDHYVVVGAQRDAWGPGAAKSGVGTALLLKLAQMFSDMVLKDGFQPSRSIIFASWSAGDFGSVGATEWLEGYLSSLHLKAFTYINLDKAVLGTSNFKVSASPLLYTLIEKTMQNVKHPVTGQFLYQDSNWASKVEKLTLDNAAFPFLAYSGIPAVSFCFCEDTDYPYLGTTMDTYKELIERIPELNKVARAAAEVAGQFVIKLTHDVELNLDYERYNSQLLSFVRDLNQYRADIKEMGLSLQWLYSARGDFFRATSRLTTDFGNAEKTDRFVMKKLNDRVMRVEYHFLSPYVSPKESPFRHVFWGSGSHTLPALLENLKLRKQNNGAFNETLFRNQLALATWTIQGAANALSGDVWDIDNEF

SEQ ID NO: 37107 - protein, 760 aa, Homo sapiens; identical to SEQ ID NO: 37106
  REGION 1..760: note = ENSP00000376197

SEQ ID NO: 37108 - protein, 81 aa, Homo sapiens
  REGION 1..81: note = ENSP00000402839
MMDQARSAFSNLFGGEPLSYTRFSLARQVDGDNSHVEMKLAVDEEENADNNTKANVTKPKRCSGSICYGTIAVIVFFLIGC

SEQ ID NO: 37109 - protein, 59 aa, Homo sapiens
  REGION 1..59: note = ENSP00000427871
MALVLEIFTLLASICWVSANIFEYQVDAQPLRPCELQRETAFLKQADYVPQCAEDGSFQ

SEQ ID NO: 37110 - protein, 2768 aa, Homo sapiens
  REGION 1..2768: note = ENSP00000220616
MALVLEIFTLLASICWVSANIFEYQVDAQPLRPCELQRETAFLKQADYVPQCAEDGSFQTVQCQNDGRSCWCVGANGSEVLGSRQPGRPVACLSFCQLQKQQILLSGYINSTDTSYLPQCQDSGDYAPVQCDVQQVQCWCVDAEGMEVYGTRQLGRPKRCPRSCEIRNRRLLHGVGDKSPPQCSAEGEFMPVQCKFVNTTDMMIFDLVHSYNRFPDAFVTFSSFQRRFPEVSGYCHCADSQGRELAETGLELLLDEIYDTIFAGLDLPSTFTETTLYRILQRRFLAVQSVISGRFRCPTKCEVERFTATSFGHPYVPSCRRNGDYQAVQCQTEGPCWCVDAQGKEMHGTRQQGEPPSCAEGQSCASERQQALSRLYFGTSGYFSQHDLFSSPEKRWASPRVARFATSCPPTIKELFVDSGLLRPMVEGQSQQFSVSENLLKEAIRAIFPSRGLARLALQFTTNPKRLQQNLFGGKFLVNVGQFNLSGALGTRGTFNFSQFFQQLGLASFLNGGRQEDLAKPLSVGLDSNSSTGTPEAAKKDGTMNKPTVGSFGFEINLQENQNALKFLASLLELPEFLLFLQHAISVPEDVARDLGDVMETVLSSQTCEQTPERLFVPSCTTEGSYEDVQCFSGECWCVNSWGKELPGSRVRGGQPRCPTDCEKQRARMQSLMGSQPAGSTLFVPACTSEGHFLPVQCFNSECYCVDAEGQAIPGTRSAIGKPKKCPTPCQLQSEQAFLRTVQALLSNSSMLPTLSDTYIPQCSTDGQWRQVQCNGPPEQVFELYQRWEAQNKGQDLTPAKLLVKIMSYREAASGNFSLFIQSLYEAGQQDVFPVLSQYPSLQDVPLAALEGKRPQPRENILLEPYLFWQILNGQLSQYPGSYSDFSTPLAHFDLRNCWCVDEAGQELEGMRSEPSKLPTCPGSCEEAKLRVLQFIRETEEIVSASNSSRFPLGESFLVAKGIRLRNEDLGLPPLFPPREAFAEQFLRGSDYAIRLAAQSTLSFYQRRRFSPDDSAGASALLRSGPYMPQCDAFGSWEPVQCHAGTGHCWCVDEKGGFIPGSLTARSLQIPQCPTTCEKSRTSGLLSSWKQARSQENPSPKDLFVPACLETGEYARLQASGAGTWCVDPASGEELRPGSSSSAQCPSLCNVLKSGVLSRRVSPGYVPACRAEDGGFSPVQCDQAQGSCWCVMDSGEEVPGTRVTGGQPACESPRCPLPFNASEVVGGTILCETISGPTGSAMQQCQLLCRQGSWSVFPPGPLICSLESGRWESQLPQPRACQRPQLWQTIQTQGHFQLQLPPGKMCSADYADLLQTFQVFILDELTARGFCQIQVKTFGTLVSIPVCNNSSVQVGCLTRERLGVNVTWKSRLEDIPVASLPDLHDIERALVGKDLLGRFTDLIQSGSFQLHLDSKTFPAETIRFLQGDHFGTSPRTWFGCSEGFYQVLTSEASQDGLGCVKCPEGSYSQDEECIPCPVGFYQEQAGSLACVPCPVGRTTISAGAFSQTHCVTDCQRNEAGLQCDQNGQYRASQKDRGSGKAFCVDGEGRRLPWWETEAPLEDSQCLMMQKFEKVPESKVIFDANAPVAVRSKVPDSEFPVMQCLTDCTEDEACSFFTVSTTEPEISCDFYAWTSDNVACMTSDQKRDALGNSKATSFGSLRCQVKVRSHGQDSPAVYLKKGQGSTTTLQKRFEPTGFQNMLSGLYNPIVFSASGANLTDAHLFCLLACDRDLCCDGFVLTQVQGGAIICGLLSSPSVLLCNVKDWMDPSEAWANATCPGVTYDQESHQVILRLGDQEFIKSLTPLEGTQDTFTNFQQVYLWKDSDMGSRPESMGCRKDTVPRPASPTEAGLTTELFSPVDLNQVIVNGNQSLSSQKHWLFKHLFSAQQANLWCLSRCVQEHSFCQLAEITESASLYFTCTLYPEAQVCDDIMESNAQGCRLILPQMPKALFRKKVILEDKVKNFYTRLPFQKLMGISIRNKVPMSEKSISNGFFECERRCDADPCCTGFGFLNVSQLKGGEVTCLTLNSLGIQMCSEENGGAWRILDCGSPDIEVHTYPFGWYQKPIAQNNAPSFCPLVVLPSLTEKVSLDSWQSLALSSVVVDPSIRHFDVAHVSTAATSNFSAVRDLCLSECSQHEACLITTLQTQPGAVRCMFYADTQSCTHSLQGQNCRLLLREEATHIYRKPGISLLSYEASVPSVPISTHGRLLGRSQAIQVGTSWKQVDQFLGVPYAAPPLAERRFQAPEPLNWTGSWDASKPRASCWQPGTRTSTSPGVSEDCLYLNVFIPQNVAPNASVLVFFHNTMDREESEGWPAIDGSFLAAVGNLIVVTASYRVGVFGFLSSGSGEVSGNWGLLDQVAALTWVQTHIRGFGGDPRRVSLAADRGGADVASIHLLTARATNSQLFRRAVLMGGSALSPAAVISHERAQQQAIALAKEVSCPMSSSQEVVSCLRQKPANVLNDAQTKLLAVSGPFHYWGPVIDGHFLREPPARALKRSLWVEVDLLIGSSQDDGLINRAKAVKQFEESRGRTSSKTAFYQALQNSLGGEDSDARVEAAATWYYSLEHSTDDYASFSRALENATRDYFIICPIIDMASAWAKRARGNVFMYHAPENYGHGSLELLADVQFALGLPFYPAYEGQFSLEEKSLSLKIMQYFSHFIRSGNPNYPYEFSRKVPTFATPWPDFVPRAGGENYKEFSELLPNRQGLKKADCSFWSKYISSLKTSADGAKGGQSAESEEEELTAGSGLREDLLSLQEPGSKTYSK

SEQ ID NO: 37111 - protein, 147 aa, Homo sapiens
  REGION 1..147: note = ENSP00000428628
  VARIANT 1: note = Any amino acid
XSAGASALLRSGPYMPQCDAFGSWEPVQCHAGTGHCWCVDEKGGFIPGSLTARSLQIPQCPTTCEKSRTSGLLSSWKQARSQENPSPKDLFVPACLEARGVRCHSTRRRWLVEQSCVRQSRAPQALPCSSANCCAARAPGACFHQGH

SEQ ID NO: 37112 - protein, 226 aa, Homo sapiens
  REGION 1..226: note = ENSP00000429605
  VARIANT 1: note = Any amino acid
XGSWEPVQCHAGTGHCWCVDEKGGFIPGSLTARSLQIPQCPTTCEKSRTSGLLSSWKQARSQENPSPKDLFVPACLETGEYARLQASGAGTWCVDPASGEELRPGSSSSAQSCRAEDGGFSPVQCDQAQGSCWCVMDSGEEVPGTRVTGGQPACESPRCPLPFNASEVVGGTILCETISGPTGSAMQQCQLLCRQGSWSVFPPGPLICSLESGRWESQLPQPRACQ

SEQ ID NO: 37113 - protein, 1224 aa, Homo sapiens
  REGION 1..1224: note = ENSP00000430523
  VARIANT 1: note = Any amino acid
XQEQAGSLACVPCPVGRTTISAGAFSQTHCVTDCQRNEAGLQCDQNGQYRASQKDRGSGKAFCVDGEGRRLPWWETEAPLEDSQCLMMQKFEKVPESKVIFDANAPVAVRSKVPDSEFPVMQCLTDCTEDEACSFFTVSTTEPEISCDFYAWTSDNVACMTSDQKRDALGNSKATSFGSLRCQVKVRSHGQDSPAVYLKKGAIICGLLSSPSVLLCNVKDWMDPSEAWANATCPGVTYDQESHQVILRLGDQEFIKSLTPLEGTQDTFTNFQQVYLWKDSDMGSRPESMGCRKDTVPRPASPTEAGLTTELFSPVDLNQVIVNGNQSLSSQKHWLFKHLFSAQQANLWCLSRCVQEHSFCQLAEITESASLYFTCTLYPEAQVCDDIMESNAQGCRLILPQMPKALFRKKVILEDKVKNFYTRLPFQKLMGISIRNKVPMSEKSISNGFFECERRCDADPCCTGFGFLNVSQLKGGEVTCLTLNSLGIQMCSEENGGAWRILDCGSPDIEVHTYPFGWYQKPIAQNNAPSFCPLVVLPSLTEKVSLDSWQSLALSSVVVDPSIRHFDVAHVSTAATSNFSAVRDLCLSECSQHEACLITTLQTQPGAVRCMFYADTQSCTHSLQGQNCRLLLREEATHIYRKPGISLLSYEASVPSVPISTHGRLLGRSQAIQVGTSWKQVDQFLGVPYAAPPLAERRFQAPEPLNWTGSWDASKPRASCWQPGTRTSTSPGVSEDCLYLNVFIPQNVAPNASVLVFFHNTMDREESEGWPAIDGSFLAAVGNLIVVTASYRVGVFGFLSSGSGEVSGNWGLLDQVAALTWVQTHIRGFGGDPRRVSLAADRGGADVASIHLLTARATNSQLFRRAVLMGGSALSPAAVISHERAQQQAIALAKEVSCPMSSSQEVVSCLRQKPANVLNDAQTKLLAVSGPFHYWGPVIDGHFLREPPARALKRSLWVEVDLLIGSSQDDGLINRAKAVKQFEESRGRTSSKTAFYQALQNSLGGEDSDARVEAAATWYYSLEHSTDDYASFSRALENATRDYFIICPIIDMASAWAKRARGNVFMYHAPENYGHGSLELLADVQFALGLPFYPAYEGQFSLEEKSLSLKIMQYFSHFIRSGNPNYPYEFSRKVPTFATPWPDFVPRAGGENYKEFSELLPNRQGLKKADCSFWSKYISSLKTSADGAKGGQSAESEEEELTAGSGLREDLLSLQEPGSKTYSK

SEQ ID NO: 37114 - protein, 62 aa, Homo sapiens
  REGION 1..62: note = ENSP00000429164
  VARIANT 1: note = Any amino acid
XSDMGSRPESMGCRKDTVPRPASPTEAGCVQEHSFCQLAEITESASLYFTCTLYPEAQVCDD

SEQ ID NO: 37115 - protein, 901 aa, Homo sapiens
  REGION 1..901: note = ENSP00000430430
MLPGLTTELFSPVDLNQVIVNGNQSLSSQKHWLFKHLFSAQQANLWCLSRCVQEHSFCQLAEITESASLYFTCTLYPEAQVCDDIMESNAQGCRLILPQMPKALFRKKVILEDKVKNFYTRLPFQKLMGISIRNKVPMSEKSISNGFFECERRCDADPCCTGFGFLNVSQLKGGEVTCLTLNSLGIQMCSEENGGAWRILDCGSPDIEVHTYPFGWYQKPMSLDSWQSLALSSVVVDPSIRHFDVAHVSTAATSNFSAVRDLCLSECSQHEACLITTLQTQPGAVRCMFYADTQSCTHSLQGQNCRLLLREEATHIYRKPGISLLSYEASVPSVPISTHGRLLGRSQAIQVGTSWKQVDQFLGVPYAAPPLAERRFQAPEPLNWTGSWDASKPRASCWQPGTRTSTSPGVSEDCLYLNVFIPQNVAPNASVLVFFHNTMDREESEGWPAIDGSFLAAVGNLIVVTASYRVGVFGFLSSGSGEVSGNWGLLDQVAALTWVQTHIRGFGGDPRRVSLAADRGGADVASIHLLTARATNSQLFRRAVLMGGSALSPAAVISHERAQQQAIALAKEVSCPMSSSQEVVSCLRQKPANVLNDAQTKLLAVSGPFHYWGPVIDGHFLREPPARALKRSLWVEVDLLIGSSQDDGLINRAKAVKQFEESRGRTSSKTAFYQALQNSLGGEDSDARVEAAATWYYSLEHSTDDYASFSRALENATRDYFIICPIIDMASAWAKRARGNVFMYHAPENYGHGSLELLADVQFALGLPFYPAYEGQFSLEEKSLSLKIMQYFSHFIRSGNPNYPYEFSRKVPTFATPWPDFVPRAGGENYKEFSELLPNRQGLKKADCSFWSKYISSLKTSADGAKGGQSAESEEEELTAGSGLREDLLSLQEPGSKTYSK

SEQ ID NO: 37116 - protein, 74 aa, Homo sapiens
  REGION 1..74: note = ENSP00000430087
  VARIANT 1: note = Any amino acid
XGIQMCSEENGGAWRILDCGSPDIEVHTYPFGWYQKPIAQNNAPSFCPLVVLPSLTEKVFKVREVRGTQLKRME

SEQ ID NO: 37117 - protein, 194 aa, Homo sapiens
  REGION 1..194: note = ENSP00000429761
  VARIANT 1: note = Any amino acid
XHSECQWREHSLRPLPFLTPFSSLSQQESLCSAMRHLYLLCPFPPMAGCWAGPRPSRASCWQPGTRTSTSPGVSEDCLYLNVFIPQNVAPNASVLVFFHNTMDREESEGWPAIDGSFLAAVGNLIVVTASYRVGVFGFLSSGSGEVSGNWGLLDQVAALTWVQTHIRGFGGDPRRVSLAADRGGADVASIHLLT

SEQ ID NO: 37118 - protein, 172 aa, Homo sapiens
  REGION 1..172: note = ENSP00000430161
SDARVEAAATWYYSLEHSTDDYASFSRALENATRDYFIICPIIDMASAWAKRARGNVFMYHAPENYGHGRNPNYPYEFSRKVPTFATPWPDFVPRAGGENYKEFSELLPNRQGLKKADCSFWSKYISSLKTSADGAKGGQSAESEEEELTAGSGLREDLLSLQEPGSKTYSK

SEQ ID NO: 37119 - protein, 414 aa, Homo sapiens
  REGION 1..414: note = ENSP00000355897
MHYCVLSAFLILHLVTVALSLSTCSTLDMDQFMRKRIEAIRGQILSKLKLTSPPEDYPEPEEVPPEVISIYNSTRDLLQEKASRRAAACERERSDEEYYAKEVYKIDMPPFFPSENAIPPTFYRPYFRIVRFDVSAMEKNASNLVKAEFRVFRLQNPKARVPEQRIELYQILKSKDLTSPTQRYIDSKVVKTRAEGEWLSFDVTDAVHEWLHHKDRNLGFKISLHCPCCTFVPSNNYIIPNKSEELEARFAGIDGTSTYTSGDQKTIKSTRKKNSGKTPHLLLMLLPSYRLESQQTNRRKKRALDAAYCFRNVQDNCCLRPLYIDFKRDLGWKWIHEPKGYNANFCAGACPYLWSSDTQHSRVLSLYNTINPEASASPCCVSQDLEPLTILYYIGKTPKIEQLSNMIVKSCKCS

SEQ ID NO: 37120 - protein, 442 aa, Homo sapiens
  REGION 1..442: note = ENSP00000355896
MHYCVLSAFLILHLVTVALSLSTCSTLDMDQFMRKRIEAIRGQILSKLKLTSPPEDYPEPEEVPPEVISIYNSTRDLLQEKASRRAAACERERSDEEYYAKEVYKIDMPPFFPSETVCPVVTTPSGSVGSLCSRQSQVLCGYLDAIPPTFYRPYFRIVRFDVSAMEKNASNLVKAEFRVFRLQNPKARVPEQRIELYQILKSKDLTSPTQRYIDSKVVKTRAEGEWLSFDVTDAVHEWLHHKDRNLGFKISLHCPCCTFVPSNNYIIPNKSEELEARFAGIDGTSTYTSGDQKTIKSTRKKNSGKTPHLLLMLLPSYRLESQQTNRRKKRALDAAYCFRNVQDNCCLRPLYIDFKRDLGWKWIHEPKGYNANFCAGACPYLWSSDTQHSRVLSLYNTINPEASASPCCVSQDLEPLTILYYIGKTPKIEQLSNMIVKSCKCS

SEQ ID NO: 37121 - protein, 309 aa, Homo sapiens
  REGION 1..309: note = ENSP00000451110
MKMHLQRALVVLALLNFATVSLSLSTCTTLDFGHIKKKRVEAIRGQILSKLRLTSPPEPTVMTHVPYQVLALYNSTRELLEEMHGEREEGCTQENTESEYYAKEIHKFDMIQGLAEHNELAVCPKGITSKVFRFNVSSVEKNRTNLFRAEFRVLRVPNPSSKRNEQRIELFQILRPDEHIAKQRYIGGKNLPTRGTAEWLSFDVTDTVREWLLRRESNLGLEISIHCPCHTFQPNGDILENIHEVMEIKFKGVDNEDDHGRGDLGRLKKQKDHHNPHLILMMIPPHRLDNPGQGGQRKKRALDTNYCFR

SEQ ID NO: 37122 - protein, 412 aa, Homo sapiens
  REGION 1..412: note = ENSP00000238682
MKMHLQRALVVLALLNFATVSLSLSTCTTLDFGHIKKKRVEAIRGQILSKLRLTSPPEPTVMTHVPYQVLALYNSTRELLEEMHGEREEGCTQENTESEYYAKEIHKFDMIQGLAEHNELAVCPKGITSKVFRFNVSSVEKNRTNLFRAEFRVLRVPNPSSKRNEQRIELFQILRPDEHIAKQRYIGGKNLPTRGTAEWLSFDVTDTVREWLLRRESNLGLEISIHCPCHTFQPNGDILENIHEVMEIKFKGVDNEDDHGRGDLGRLKKQKDHHNPHLILMMIPPHRLDNPGQGGQRKKRALDTNYCFRNLEENCCVRPLYIDFRQDLGWKWVHEPKGYYANFCSGPCPYLRSADTTHSTVLGLYNTLNPEASASPCCVPQDLEPLTILYYVGRTPKVEQLSNMVVKSCKCS

SEQ ID NO: 37123 - protein, 567 aa, Homo sapiens
  REGION 1..567: note = ENSP00000295754
MGRGLLRGLWPLHIVLWTRIASTIPPHVQKSVNNDMIVTDNNGAVKFPQLCKFCDVRFSTCDNQKSCMSNCSITSICEKPQEVCVAVWRKNDENITLETVCHDPKLPYHDFILEDAASPKCIMKEKKKPGETFFMCSCSSDECNDNIIFSEEYNTSNPDLLLVIFQVTGISLLPPLGVAISVIIIFYCYRVNRQQKLSSTWETGKTRKLMEFSEHCAIILEDDRSDISSTCANNINHNTELLPIELDTLVGKGRFAEVYKAKLKQNTSEQFETVAVKIFPYEEYASWKTEKDIFSDINLKHENILQFLTAEERKTELGKQYWLITAFHAKGNLQEYLTRHVISWEDLRKLGSSLARGIAHLHSDHTPCGRPKMPIVHRDLKSSNILVKNDLTCCLCDFGLSLRLDPTLSVDDLANSGQVGTARYMAPEVLESRMNLENVESFKQTDVYSMALVLWEMTSRCNAVGEVKDYEPPFGSKVREHPCVESMKDNVLRDRGRPEIPSFWLNHQGIQMVCETLTECWDHDPEARLTAQCVAERFSELEHLDRLSGRSCSEEKIPEDGSLNTTK

SEQ ID NO: 37124 - protein, 592 aa, Homo sapiens
  REGION 1..592: note = ENSP00000351905
MGRGLLRGLWPLHIVLWTRIASTIPPHVQKSDVEMEAQKDEIICPSCNRTAHPLRHINNDMIVTDNNGAVKFPQLCKFCDVRFSTCDNQKSCMSNCSITSICEKPQEVCVAVWRKNDENITLETVCHDPKLPYHDFILEDAASPKCIMKEKKKPGETFFMCSCSSDECNDNIIFSEEYNTSNPDLLLVIFQVTGISLLPPLGVAISVIIIFYCYRVNRQQKLSSTWETGKTRKLMEFSEHCAIILEDDRSDISSTCANNINHNTELLPIELDTLVGKGRFAEVYKAKLKQNTSEQFETVAVKIFPYEEYASWKTEKDIFSDINLKHENILQFLTAEERKTELGKQYWLITAFHAKGNLQEYLTRHVISWEDLRKLGSSLARGIAHLHSDHTPCGRPKMPIVHRDLKSSNILVKNDLTCCLCDFGLSLRLDPTLSVDDLANSGQVGTARYMAPEVLESRMNLENVESFKQTDVYSMALVLWEMTSRCNAVGEVKDYEPPFGSKVREHPCVESMKDNVLRDRGRPEIPSFWLNHQGIQMVCETLTECWDHDPEARLTAQCVAERFSELEHLDRLSGRSCSEEKIPEDGSLNTTK

SEQ ID NO: 37125 - protein, 528 aa, Homo sapiens
  REGION 1..528: note = ENSP00000370571
MPTPDATTPQAKGFRRAVSELDAKQAEAIMVRGQGAPGPSLTGSPWPGTAAPAASYTPTPRSPRFIGRRQSLIEDARKEREAAVAAAAAAVPSEPGDPLEAVAFEEKEGKAVLNLLFSPRATKPSALSRAVKVFETFEAKIHHLETRPAQRPRAGGPHLEYFVRLEVRRGDLAALLSGVRQVSEDVRSPAGPKVPWFPRKVSELDKCHHLVTKFDPDLDLDHPGFSDQVYRQRRKLIAEIAFQYRHGDPIPRVEYTAEEIATWKEVYTTLKGLYATHACGEHLEAFALLERFSGYREDNIPQLEDVSRFLKERTGFQLRPVAGLLSARDFLASLAFRVFQCTQYIRHASSPMHSPEPDCCHELLGHVPMLADRTFAQFSQDIGLASLGASDEEIEKLSTLYWFTVEFGLCKQNGEVKAYGAGLLSSYGELLHCLSEEPEIRAFDPEAAAVQPYQDQTYQSVYFVSESFSDAKDKLRSYASRIQRPFSVKFDPYTLAIDVLDSPQAVRRSLEGVQDELDTLAHALSAIG

SEQ ID NO: 37126 - protein, 524 aa, Homo sapiens
  REGION 1..524: note = ENSP00000370567
MPTPDATTPQAKGFRRAVSELDAKQAEAIMGAPGPSLTGSPWPGTAAPAASYTPTPRSPRFIGRRQSLIEDARKEREAAVAAAAAAVPSEPGDPLEAVAFEEKEGKAVLNLLFSPRATKPSALSRAVKVFETFEAKIHHLETRPAQRPRAGGPHLEYFVRLEVRRGDLAALLSGVRQVSEDVRSPAGPKVPWFPRKVSELDKCHHLVTKFDPDLDLDHPGFSDQVYRQRRKLIAEIAFQYRHGDPIPRVEYTAEEIATWKEVYTTLKGLYATHACGEHLEAFALLERFSGYREDNIPQLEDVSRFLKERTGFQLRPVAGLLSARDFLASLAFRVFQCTQYIRHASSPMHSPEPDCCHELLGHVPMLADRTFAQFSQDIGLASLGASDEEIEKLSTLYWFTVEFGLCKQNGEVKAYGAGLLSSYGELLHCLSEEPEIRAFDPEAAAVQPYQDQTYQSVYFVSESFSDAKDKLRSYASRIQRPFSVKFDPYTLAIDVLDSPQAVRRSLEGVQDELDTLAHALSAIG

SEQ ID NO: 37127 - protein, 497 aa, Homo sapiens
  REGION 1..497: note = ENSP00000325951
MPTPDATTPQAKGFRRAVSELDAKQAEAIMSPRFIGRRQSLIEDARKEREAAVAAAAAAVPSEPGDPLEAVAFEEKEGKAVLNLLFSPRATKPSALSRAVKVFETFEAKIHHLETRPAQRPRAGGPHLEYFVRLEVRRGDLAALLSGVRQVSEDVRSPAGPKVPWFPRKVSELDKCHHLVTKFDPDLDLDHPGFSDQVYRQRRKLIAEIAFQYRHGDPIPRVEYTAEEIATWKEVYTTLKGLYATHACGEHLEAFALLERFSGYREDNIPQLEDVSRFLKERTGFQLRPVAGLLSARDFLASLAFRVFQCTQYIRHASSPMHSPEPDCCHELLGHVPMLADRTFAQFSQDIGLASLGASDEEIEKLSTLYWFTVEFGLCKQNGEVKAYGAGLLSSYGELLHCLSEEPEIRAFDPEAAAVQPYQDQTYQSVYFVSESFSDAKDKLRSYASRIQRPFSVKFDPYTLAIDVLDSPQAVRRSLEGVQDELDTLAHALSAIG

SEQ ID NO: 37128 - protein, 44 aa, Homo sapiens
  REGION 1..44: note = ENSP00000325831
MPTPDATTPQAKGFRRAVSELDAKQAEAIMGHQALGAVPSCEGV

SEQ ID NO: 37129 - protein, 45 aa, Homo sapiens
  REGION 1..45: note = ENSP00000403440
  VARIANT 1: note = Any amino acid
XDLDHPGFSDQVYRQRRKLIAEIAFQYRHGDPIPRVEYTAEEIAT

SEQ ID NO: 37130 - protein, 116 aa, Homo sapiens
  REGION 1..116: note = ENSP00000403546
  VARIANT 1: note = Any amino acid
XDLDHPGFSDQVYRQRRKLIAEIAFQYRHGDPIPRVEYTAEEIATWDCCHELLGHVPMLADRTFAQFSQDIGLASLGASDEEIEKLSTLYWFTVEFGLCKQNGEVKAYGAGLLSSY

SEQ ID NO: 37131 - protein, 48 aa, Homo sapiens
  REGION 1..48: note = ENSP00000370560
MPTPDATTPQAKGFRRAVSELDAKQAEAIMVRGQGHQALGAVPSCEGV

SEQ ID NO: 37132 - protein, 403 aa, Homo sapiens
  REGION 1..403: note = ENSP00000328814
MPTPDATTPQAKGFRRAVSELDAKQAEAIMSPRFIGRRQSLIEDARKEREAAVAAAAAAVPSEPGDPLEAVAFEEKEGKAVLNLLFSPRATKPSALSRAVKVFETFEAKIHHLETRPAQRPRAGGPHLEYFVRLEVRRGDLAALLSGVRQVSEDVRSPAGPKVPWFPRKVSELDKCHHLVTKFDPDLDLDHPGFSDQVYRQRRKLIAEIAFQYRHGDPIPRVEYTAEEIATWDCCHELLGHVPMLADRTFAQFSQDIGLASLGASDEEIEKLSTLYWFTVEFGLCKQNGEVKAYGAGLLSSYGELLHCLSEEPEIRAFDPEAAAVQPYQDQTYQSVYFVSESFSDAKDKLRSYASRIQRPFSVKFDPYTLAIDVLDSPQAVRRSLEGVQDELDTLAHALSAIG

SEQ ID NO: 37133 - protein, 1172 aa, Homo sapiens
  REGION 1..1172: note = ENSP00000355751
MVWRLVLLALWVWPSTQAGHQDKDTTFDLFSISNINRKTIGAKQFRGPDPGVPAYRFVRFDYIPPVNADDLSKITKIMRQKEGFFLTAQLKQDGKSRGTLLALEGPGLSQRQFEIVSNGPADTLDLTYWIDGTRHVVSLEDVGLADSQWKNVTVQVAGETYSLHVGCDLIDSFALDEPFYEHLQAEKSRMYVAKGSARESHFRGLLQNVHLVFENSVEDILSKKGCQQGQGAEINAISENTETLRLGPHVTTEYVGPSSERRPEVCERSCEELGNMVQELSGLHVLVNQLSENLKRVSNDNQFLWELIGGPPKTRNMSACWQDGRFFAENETWVVDSCTTCTCKKFKTICHQITCPPATCASPSFVEGECCPSCLHSVDGEEGWSPWAEWTQCSVTCGSGTQQRGRSCDVTSNTCLGPSIQTRACSLSKCDTRIRQDGGWSHWSPWSSCSVTCGVGNITRIRLCNSPVPQMGGKNCKGSGRETKACQGAPCPIDGRWSPWSPWSACTVTCAGGIRERTRVCNSPEPQYGGKACVGDVQERQMCNKRSCPVDGCLSNPCFPGAQCSSFPDGSWSCGSCPVGFLGNGTHCEDLDECALVPDICFSTSKVPRCVNTQPGFHCLPCPPRYRGNQPVGVGLEAAKTEKQVCEPENPCKDKTHNCHKHAECIYLGHFSDPMYKCECQTGYAGDGLICGEDSDLDGWPNLNLVCATNATYHCIKDNCPHLPNSGQEDFDKDGIGDACDDDDDNDGVTDEKDNCQLLFNPRQADYDKDEVGDRCDNCPYVHNPAQIDTDNNGEGDACSVDIDGDDVFNERDNCPYVYNTDQRDTDGDGVGDHCDNCPLVHNPDQTDVDNDLVGDQCDNNEDIDDDGHQNNQDNCPYISNANQADHDRDGQGDACDPDDDNDGVPDDRDNCRLVFNPDQEDLDGDGRGDICKDDFDNDNIPDIDDVCPENNAISETDFRNFQMVPLDPKGTTQIDPNWVIRHQGKELVQTANSDPGIAVGFDEFGSVDFSGTFYVNTDRDDDYAGFVFGYQSSSRFYVVMWKQVTQTYWEDQPTRAYGYSGVSLKVVNSTTGTGEHLRNALWHTGNTPGQVRTLWHDPRNIGWKDYTAYRWHLTHRPKTGYIRVLVHEGKQVMADSGPIYDQTYAGGRLGLFVFSQEMVYFSDLKYECRDI

SEQ ID NO: 37134 - protein, 83 aa, Homo sapiens
  REGION 1..83: note = ENSP00000398928
MVWRLVLLALWVWPSTQAGHQDKDTTFDLFSISNINRKTIGAKQFRGPDPGVPAYRFVRFDYIPPVNADDLSKITKIMRQKEG

SEQ ID NO: 37135 - protein, 1172 aa, Homo sapiens; identical to SEQ ID NO: 37133
  REGION 1..1172: note = ENSP00000482784

SEQ ID NO: 37136 - protein, 961 aa, Homo sapiens
  REGION 1..961: note = ENSP00000339730
MLAPRGAAVLLLHLVLQRWLAAGAQATPQVFDLLPSSSQRLNPGALLPVLTDPALNDLYVISTFKLQTKSSATIFGLYSSTDNSKYFEFTVMGRLNKAILRYLKNDGKVHLVVFNNLQLADGRRHRILLRLSNLQRGAGSLELYLDCIQVDSVHNLPRAFAGPSQKPETIELRTFQRKPQDFLEELKLVVRGSLFQVASLQDCFLQQSEPLAATGTGDFNRQFLGQMTQLNQLLGEVKDLLRQQVKETSFLRNTIAECQACGPLKFQSPTPSTVVPPAPPAPPTRPPRRCDSNPCFRGVQCTDSRDGFQCGPCPEGYTGNGITCIDVDECKYHPCYPGVHCINLSPGFRCDACPVGFTGPMVQGVGISFAKSNKQVCTDIDECRNGACVPNSICVNTLGSYRCGPCKPGYTGDQIRGCKAERNCRNPELNPCSVNAQCIEERQGDVTCVCGVGWAGDGYICGKDVDIDSYPDEELPCSARNCKKDNCKYVPNSGQEDADRDGIGDACDEDADGDGILNEQDNCVLIHNVDQRNSDKDIFGDACDNCLSVLNNDQKDTDGDGRGDACDDDMDGDGIKNILDNCPKFPNRDQRDKDGDGVGDACDSCPDVSNPNQSDVDNDLVGDSCDTNQDSDGDGHQDSTDNCPTVINSAQLDTDKDGIGDECDDDDDNDGIPDLVPPGPDNCRLVPNPAQEDSNSDGVGDICESDFDQDQVIDRIDVCPENAEVTLTDFRAYQTVVLDPEGDAQIDPNWVVLNQGMEIVQTMNSDPGLAVGYTAFNGVDFEGTFHVNTQTDDDYAGFIFGYQDSSSFYVVMWKQTEQTYWQATPFRAVAEPGIQLKAVKSKTGPGEHLRNSLWHTGDTSDQVRLLWKDSRNVGWKDKVSYRWFLQHRPQVGYIRVRFYEGSELVADSGVTIDTTMRGGRLGVFCFSQENIIWSNLKYRCNDTIPEDFQEFQTQNFDRFDN

SEQ ID NO: 37137 - protein, 870 aa, Homo sapiens
  REGION 1..870: note = ENSP00000422298
MGRLNKAILRYLKNDGKVHLVVFNNLQLADGRRHRILLRLSNLQRGAGSLELYLDCIQVDSVHNLPRAFAGPSQKPETIELRTFQRKPQDFLEELKLVVRGSLFQVASLQDCFLQQSEPLAATGTGDFNRQFLGQMTQLNQLLGEVKDLLRQQVKETSFLRNTIAECQACGPLKFQSPTPSTVVPPAPPAPPTRPPRRCDSNPCFRGVQCTDSRDGFQCGPCPEGYTGNGITCIDVDECKYHPCYPGVHCINLSPGFRCDACPVGFTGPMVQGVGISFAKSNKQVCTDIDECRNGACVPNSICVNTLGSYRCGPCKPGYTGDQIRGCKAERNCRNPELNPCSVNAQCIEERQGDVTCVCGVGWAGDGYICGKDVDIDSYPDEELPCSARNCKKDNCKYVPNSGQEDADRDGIGDACDEDADGDGILNEQDNCVLIHNVDQRNSDKDIFGDACDNCLSVLNNDQKDTDGDGRGDACDDDMDGDGIKNILDNCPKFPNRDQRDKDGDGVGDACDSCPDVSNPNQSDVDNDLVGDSCDTNQDSDGDGHQDSTDNCPTVINSAQLDTDKDGIGDECDDDDDNDGIPDLVPPGPDNCRLVPNPAQEDSNSDGVGDICESDFDQDQVIDRIDVCPENAEVTLTDFRAYQTVVLDPEGDAQIDPNWVVLNQGMEIVQTMNSDPGLAVGYTAFNGVDFEGTFHVNTQTDDDYAGFIFGYQDSSSFYVVMWKQTEQTYWQATPFRAVAEPGIQLKAVKSKTGPGEHLRNSLWHTGDTSDQVRLLWKDSRNVGWKDKVSYRWFLQHRPQVGYIRVRFYEGSELVADSGVTIDTTMRGGRLGVFCFSQENIIWSNLKYRCNDTIPEDFQEFQTQNFDRFDN

SEQ ID NO: 37138 - protein, 50 aa, Homo sapiens
  REGION 1..50: note = ENSP00000473349
MFPKSNLTVTCWVWRSMRKLFLLLSLLLSHAAHLEGKKDNQFIWKPGLAK

SEQ ID NO: 37139 - protein, 1606 aa, Homo sapiens
  REGION 1..1606: note = ENSP00000387145
MFPKSNLTVTCWVWRSMRKLFLLLSLLLSHAAHLEGKKDNQFIWKPGPWGRCTGDCGPGGVQSRAVWCFHVDGWTSHLSNCGESNRPPKERSCFRVCDWHSDLFQWEVSDWHHCVLVPYARGEVKPRTAECVTAQHGLQHRMVRCIQKLNRTVVANEICEHFALQPPTEQACLIPCPRDCVVSEFLPWSNCSKGCGKKLQHRTRAVIAPPLFGGLQCPNLTESRACDAPISCPLGEEEYTFSLKVGPWSKCRLPHLKEINPSGRTVLDFNSDSNERVTFKHQSYKAHHHSKSWAIEIGYQTRQVSCTRSDGQNAMLSLCLQDSFPLTVQSCIMPKDCETSQWSSWSPCSKTCRSGSLLPGFRSRSRNVKHMAIGGGKECPELLEKEACIVEGELLQQCPRYSWRTSEWKECQVSLLLEQQDPHWHVTGPVCGGGIQTREVYCAQSVPAAAALRAKEVSRPVEKALCVGPAPLPSQLCNIPCSTDCIVSSWSAWGLCIHENCHDPQGKKGFRTRQRHVLMESTGPAGHCPHLVESVPCEDPMCYRWLASEGICFPDHGKCGLGHRILKAVCQNDRGEDVSGSLCPVPPPPERKSCEIPCRMDCVLSEWTEWSSCSQSCSNKNSDGKQTRSRTILALAGEGGKPCPPSQALQEHRLCNDHSCMQLHWETSPWGPCSEDTLVTALNATIGWNGEATCGVGIQTRRVFCVKSHVGQVMTKRCPDSTRPETVRPCFLPCKKDCIVTAFSEWTPCPRMCQAGNATVKQSRYRIIIQEAANGGQECPDTLYEERECEDVSLCPVYRWKPQKWSPCILVPESVWQGITGSSEACGKGLQTRAVSCISDDNRSAEMMECLKQTNGMPLLVQECTVPCREDCTFTAWSKFTPCSTNCEATKSRRRQLTGKSRKKEKCQDSDLYPLVETELCPCDEFISQPYGNWSDCILPEGRREPHRGLRVQADSKECGEGLRFRAVACSDKNGRPVDPSFCSSSGYIQEKCVIPCPFDCKLSDWSSWGSCSSSCGIGVRIRSKWLKEKPYNGGRPCPKLDLKNQVHEAVPCYSECNQYSWVVEHWSSCKINNELRSLRCGGGTQSRKIRCVNTADGEGGAVDSNLCNQDEIPPETQSCSLMCPNECVMSEWGLWSKCPQSCDPHTMQRRTRHLLRPSLNSRTCAEDSQVQPCLLNENCFQFQYNLTEWSTCQLSENAPCGQGVRTRLLSCVCSDGKPVSMDQCEQHNLEKPQRMSIPCLVECVVNCQLSGWTAWTECSQTCGHGGRMSRTRFIIMPTQGEGRPCPTELTQEKTCPVTPCYSWVLGNWSACKLEGGDCGEGVQIRSLSCMVHSGSISHAAGRVEDALCGEMPFQDSILKQLCSVPCPGDCHLTEWSEWSTCELTCIDGRSFETVGRQSRSRTFIIQSFENQDSCPQQVLETRPCTGGKCYHYTWKASLWNNNERTVWCQRSDGVNVTGGCSPQARPAAIRQCIPACRKPFSYCTQGGVCGCEKGYTEIMKSNGFLDYCMKVPGSEDKKADVKNLSGKNRPVNSKIHDIFKGWSLQPLDPDGRVKIWVYGVSGGAFLIMIFLIFTSYLVCKKPKPHQSTPPQQKPLTLAYDGDLDM

SEQ ID NO: 37140 - protein, 1577 aa, Homo sapiens
  REGION 1..1577: note = ENSP00000413841
MHNTADEVVLYHKLAGPWGRCTGDCGPGGVQSRAVWCFHVDGWTSHLSNCGESNRPPKERSCFRVCDWHSDLFQWEVSDWHHCVLVPYARGEVKPRTAECVTAQHGLQHRMVRCIQKLNRTVVANEICEHFALQPPTEQACLIPCPRDCVVSEFLPWSNCSKGCGKKLQHRTRAVIAPPLFGGLQCPNLTESRACDAPISCPLGEEEYTFSLKVGPWSKCRLPHLKEINPSGRTVLDFNSDSNERVTFKHQSYKAHHHSKSWAIEIGYQTRQVSCTRSDGQNAMLSLCLQDSFPLTVQSCIMPKDCETSQWSSWSPCSKTCRSGSLLPGFRSRSRNVKHMAIGGGKECPELLEKEACIVEGELLQQCPRYSWRTSEWKECQVSLLLEQQDPHWHVTGPVCGGGIQTREVYCAQSVPAAAALRAKEVSRPVEKALCVGPAPLPSQLCNIPCSTDCIVSSWSAWGLCIHENCHDPQGKKGFRTRQRHVLMESTGPAGHCPHLVESVPCEDPMCYRWLASEGICFPDHGKCGLGHRILKAVCQNDRGEDVSGSLCPVPPPPERKSCEIPCRMDCVLSEWTEWSSCSQSCSNKNSDGKQTRSRTILALAGEGGKPCPPSQALQEHRLCNDHSCMQLHWETSPWGPCSEDTLVTALNATIGWNGEATCGVGIQTRRVFCVKSHVGQVMTKRCPDSTRPETVRPCFLPCKKDCIVTAFSEWTPCPRMCQAGNATVKQSRYRIIIQEAANGGQECPDTLYEERECEDVSLCPVYRWKPQKWSPCILVPESVWQGITGSSEACGKGLQTRAVSCISDDNRSAEMMECLKQTNGMPLLVQECTVPCREDCTFTAWSKFTPCSTNCEATKSRRRQLTGKSRKKEKCQDSDLYPLVETELCPCDEFISQPYGNWSDCILPEGRREPHRGLRVQADSKECGEGLRFRAVACSDKNGRPVDPSFCSSSGYIQEKCVIPCPFDCKLSDWSSWGSCSSSCGIGVRIRSKWLKEKPYNGGRPCPKLDLKNQAQVHEAVPCYSECNQYSWVVEHWSSCKINNELRSLRCGGGTQSRKIRCVNTADGEGGAVDSNLCNQDEIPPETQSCSLMCPNECVMSEWGLWSKCPQSCDPHTMQRRTRHLLRPSLNSRTCAEDSQVQPCLLNENCFQFQYNLTEWSTCQLSENAPCGQGVRTRLLSCVCSDGKPVSMDQCEQHNLEKPQRMSIPCLVECVVNCQLSGWTAWTECSQTCGHGGRMSRTRFIIMPTQGEGRPCPTELTQEKTCPVTPCYSWVLGNWSACKLEGGDCGEGVQIRSLSCMVHSGSISHAAGRVEDALCGEMPFQDSILKQLCSVPCPGDCHLTEWSEWSTCELTCIDGRSFETVGRQSRSRTFIIQSFENQDSCPQQVLETRPCTGGKCYHYTWKASLWNNNERTVWCQRSDGVNVTGGCSPQARPAAIRQCIPACRKPFSYCTQGGVCGCEKGYTEIMKSNGFLDYCMKVPGSEDKKADVKNLSGKNRPVNSKIHDIFKGWSLQPLDPDGRVKIWVYGVSGGAFLIMIFLIFTSYLVCKKPKPHQSTPPQQKPLTLAYDGDLDM

SEQ ID NO: 37141 - protein, 1608 aa, Homo sapiens
  REGION 1..1608: note = ENSP00000272643
MFPKSNLTVTCWVWRSMRKLFLLLSLLLSHAAHLEGKKDNQFIWKPGPWGRCTGDCGPGGVQSRAVWCFHVDGWTSHLSNCGESNRPPKERSCFRVCDWHSDLFQWEVSDWHHCVLVPYARGEVKPRTAECVTAQHGLQHRMVRCIQKLNRTVVANEICEHFALQPPTEQACLIPCPRDCVVSEFLPWSNCSKGCGKKLQHRTRAVIAPPLFGGLQCPNLTESRACDAPISCPLGEEEYTFSLKVGPWSKCRLPHLKEINPSGRTVLDFNSDSNERVTFKHQSYKAHHHSKSWAIEIGYQTRQVSCTRSDGQNAMLSLCLQDSFPLTVQSCIMPKDCETSQWSSWSPCSKTCRSGSLLPGFRSRSRNVKHMAIGGGKECPELLEKEACIVEGELLQQCPRYSWRTSEWKECQVSLLLEQQDPHWHVTGPVCGGGIQTREVYCAQSVPAAAALRAKEVSRPVEKALCVGPAPLPSQLCNIPCSTDCIVSSWSAWGLCIHENCHDPQGKKGFRTRQRHVLMESTGPAGHCPHLVESVPCEDPMCYRWLASEGICFPDHGKCGLGHRILKAVCQNDRGEDVSGSLCPVPPPPERKSCEIPCRMDCVLSEWTEWSSCSQSCSNKNSDGKQTRSRTILALAGEGGKPCPPSQALQEHRLCNDHSCMQLHWETSPWGPCSEDTLVTALNATIGWNGEATCGVGIQTRRVFCVKSHVGQVMTKRCPDSTRPETVRPCFLPCKKDCIVTAFSEWTPCPRMCQAGNATVKQSRYRIIIQEAANGGQECPDTLYEERECEDVSLCPVYRWKPQKWSPCILVPESVWQGITGSSEACGKGLQTRAVSCISDDNRSAEMMECLKQTNGMPLLVQECTVPCREDCTFTAWSKFTPCSTNCEATKSRRRQLTGKSRKKEKCQDSDLYPLVETELCPCDEFISQPYGNWSDCILPEGRREPHRGLRVQADSKECGEGLRFRAVACSDKNGRPVDPSFCSSSGYIQEKCVIPCPFDCKLSDWSSWGSCSSSCGIGVRIRSKWLKEKPYNGGRPCPKLDLKNQGQVHEAVPCYSECNQYSWVVEHWSSCKINNELRSLRCGGGTQSRKIRCVNTADGEGGAVDSNLCNQDEIPPETQSCSLMCPNECVMSEWGLWSKCPQSCDPHTMQRRTRHLLRPSLNSRTCAEDSQVQPCLLNENCFQFQYNLTEWSTCQLSENAPCGQGVRTRLLSCVCSDGKPVSMDQCEQHNLEKPQRMSIPCLVECVVNCQLSGWTAWTECSQTCGHGGRMSRTRFIIMPTQGEGRPCPTELTQEKTCPVTPCYSWVLGNWSACKLEGGDCGEGVQIRSLSCMVHSGSISHAAGRVEDALCGEMPFQDSILKQLCSVPCPGDCHLTEWSEWSTCELTCIDGRSFETVGRQSRSRTFIIQSFENQDSCPQQVLETRPCTGGKCYHYTWKASLWNNNERTVWCQRSDGVNVTGGCSPQARPAAIRQCIPACRKPFSYCTQGGVCGCEKGYTEIMKSNGFLDYCMKVPGSEDKKADVKNLSGKNRPVNSKIHDIFKGWSLQPLDPDGRVKIWVYGVSGGAFLIMIFLIFTSYLVCKKPKPHQSTPPQQKPLTLAYDGDLDM

SEQ ID NO: 37142 - protein, 225 aa, Homo sapiens
  REGION 1..225: note = ENSP00000376374
MSRPRKRLAGTSGSDKGLSGKRTKTENSGEALAKVEDSNPQKTSATKNCLKNLSSHWLMKSEPESRLEKGVDVKFSIEDLKAQPKQTTCWDGVRNYQARNFLRAMKLGEEAFFYHSNCKEPGIAGLMKIVKEAYPDHTQFEKNNPHYDPSSKEDNPKWSMVDVQFVRMMKRFIPLAELKSYHQAHKATGGPLKNMVLFTRQRLSIQPLTQEEFDFVLSLEEKEPS

SEQ ID NO: 37143 - protein, 225 aa, Homo sapiens; identical to SEQ ID NO: 37142
  REGION 1..225: note = ENSP00000341657

SEQ ID NO: 37144 - protein, 225 aa, Homo sapiens; identical to SEQ ID NO: 37142
  REGION 1..225: note = ENSP00000376373

SEQ ID NO: 37145 - protein, 166 aa, Homo sapiens
  REGION 1..166: note = ENSP00000341452
MSRPRKRLAGTSGSDKGLSGKRTKTENSGEALAKVEDSNPQKTSATKNCLKNLSSHWLMKSEPESRLEKGVDVKFSIEDLKAQPKQTTCWDGVRNYQARNFLRAMKLGEEAFFYHSNCKEPGIAGLMKIVKEAYPDHTQFEKNNPHYDPSSKEDNPKWSMKSLILF

SEQ ID NO: 37146 - protein, 211 aa, Homo sapiens
  REGION 1..211: note = ENSP00000266085
MTPWLGLIVLLGSWSLGDWGAEACTCSPSHPQDAFCNSDIVIRAKVVGKKLVKEGPFGTLVYTIKQMKMYRGFTKMPHVQYIHTEASESLCGLKLEVNKYQYLLTGRVYDGKMYTGLCNFVERWDQLTLSQRKGLNYRYHLGCNCKIKSCYYLPCFVTSKNECLWTDMLSNFGYPGYQSKHYACIRQKGGYCSWYRGWAPPDKSIINATDP

SEQ ID NO: 37147 - protein, 657 aa, Homo sapiens
  REGION 1..657: note = ENSP00000418757
MEMETTEPEPDCVVQPPSPPDDFSCQMRLSEKITPLKTCFKKKDQKRLGTGTLRSLRPILNTLLESGSLDGVFRSRNQSTDENSLHEPMMKKAMEINSSCPPAENNMSVLIPDRTNVGDQIPEAHPSTEAPERVVPIQDHSFPSETLSGTVADSTPAHFQTDLLHPVSSDVPTSPDCLDKVIDYVPGIFQENSFTIQYILDTSDKLSTELFQDKSEEASLDLVFELVNQLQYHTHQENGIEICMDFLQGTCIYGRDCLKHHTVLPYHWQIKRTTTQKWQSVFNDSQEHLERFYCNPENDRMRMKYGGQEFWADLNAMNVYETTEFDQLRRLSTPPSSNVNSIYHTVWKFFCRDHFGWREYPESVIRLIEEANSRGLKEVRFMMWNNHYILHNSFFRREIKRRPLFRSCFILLPYLQTLGGVPTQAPPPLEATSSSQIICPDGVTSANFYPETWVYMHPSQDFIQVPVSAEDKSYRIIYNLFHKTVPEFKYRILQILRVQNQFLWEKYKRKKEYMNRKMFGRDRIINERHLFHGTSQDVVDGICKHNFDPRVCGKHATMFGQGSYFAKKASYSHNFSKKSSKGVHFMFLAKVLTGRYTMGSHGMRRPPPVNPGSVTSDLYDSCVDNFFEPQIFVIFNDDQSYPYFVIQYEEVSNTVSI

SEQ ID NO: 37148 - protein, 657 aa, Homo sapiens; identical to SEQ ID NO: 37147
  REGION 1..657: note = ENSP00000295924

SEQ ID NO: 37149 - protein, 657 aa, Homo sapiens; identical to SEQ ID NO: 37147
  REGION 1..657: note = ENSP00000420612

SEQ ID NO: 37150 - protein, 506 aa, Homo sapiens
  REGION 1..506: note = ENSP00000419982
MEMETTEPEPDCVVQPPSPPDDFSCQMRLSEKITPLKTCFKKKDQKRLGTGTLRSLRPILNTLLESGSLDGVFRSRNQSTDENSLHEPMMKKAMEINSSCPPAENNMSVLIPDRTNVGDQIPEAHPSTEAPERVVPIQDHSFPSETLSGTVADSTPAHFQTDLLHPVSSDVPTSPDCLDKVIDYVPGIFQENSFTIQYILDTSDKLSTELFQDKSEEASLDLVFELVNQLQYHTHQENGIEICMDFLQGTCIYGRDCLKHHTVLPYHWQIKRTTTQKWQSVFNDSQEHLERFYCNPENDRMRMKYGGQEFWADLNAMNVYETTEFDQLRRLSTPPSSNVNSIYHTVWKFFCRDHFGWREYPESVIRLIEEANSRGLKEVRFMMWNNHYILHNSFFRREIKRRPLFRSCFILLPYLQTLGGVPTQAPPPLEATSSSQIICPDGVTSANFYPETWVYMHPSQDFIQVPVSAEDKSYRIIYNLFHKTVPEFKYRILQILRVQNQFLWEK

SEQ ID NO: 37151 - protein, 654 aa, Homo sapiens
  REGION 1..654: note = ENSP00000418829
MEMETTEPEPDCVVQPPSPPDDFSCQMRLSEKITPLKTCFKKKDQKRLGTGTLRSLRPILNTLLESGSLDGVFRSRNQSTDENSLHEPMMKKAMEINSSCPPAENNMSVLIPDRTNVGDQIPEAHPSTEAPERVVPIQDHSFPSETLSGTVADSTPAHFQTDLLHPVSSDVPTSPDCLDKVIDYVPGIFQENSFTIQYILDTSDKLSTELFQDKSEEASLDLVFELVNQLQYHTHQENGIEICMDFLQGTCIYGRDCLKHHTVLPYHWQIKRTTTQKWQSVFNDSQEHLERFYCNPENDRMRMKYGGQEFWADLNAMNVYETTEFDQLRRLSTPPSSNVNSIYHTVWKFFCRDHFGWREYPESVIRLIEEANSRGLKEVRFMMWNNHYILHNSFFRREIKRRPLFRSCFILLPYLQTLGGVPTQAPPPLEATSSSQIICPDGVTSANFYPETWVYMHPSQDFIQVPVSAEDKSYRIIYNLFHKTVPEFKYRILQILRVQNQFLWEKYKRKKEYMNRKMFGRDRIINERHLFHGTSQDVVDGICKHNFDPRVCGKHATMFGQGSYFAKKASYSHNFSKKSSKGVHFMFLAKVLTGRYTMGSHGMRRPPPVNPGSVTSDLYDSCVDNFFEPQIFVIFNDDQSYPYFVIQYEEVSNT

SEQ ID NO: 37152 - protein, 360 aa, Homo sapiens
  REGION 1..360: note = ENSP00000420141
  VARIANT 1: note = Any amino acid
XTNKLEQPRGQEFWADLNAMNVYETTEFDQLRRLSTPPSSNVNSIYHTVWKFFCRDHFGWREYPESVIRLIEEANSRGLKEVRFMMWNNHYILHNSFFRREIKRRPLFRSCFILLPYLQTLGGVPTQAPPPLEATSSSQIICPDGVTSANFYPETWVYMHPSQDFIQVPVSAEDKSYRIIYNLFHKTVPEFKYRILQILRVQNQFLWEKYKRKKEYMNRKMFGRDRIINERHLFHGTSQDVVDGICKHNFDPRVCGKHATMFGQGSYFAKKASYSHNFSKKSSKGVHFMFLAKVLTGRYTMGSHGMRRPPPVNPGSVTSDLYDSCVDNFFEPQIFVIFNDDQSYPYFVIQYEEVSNTVSI

SEQ ID NO: 37153 - protein, 657 aa, Homo sapiens; identical to SEQ ID NO: 37147
  REGION 1..657: note = ENSP00000438345

SEQ ID NO: 37154 - protein, 247 aa, Homo sapiens
  REGION 1..247: note = ENSP00000292090
MPRLLHPALPLLLGATLTFRALRRALCRLPLPVHVRADPLRTWRWHNLLVSFAHSIVSGIWALLCVWQTPDMLVEIETAWSLSGYLLVCFSAGYFIHDTVDIVASGQTRASWEYLVHHVMAMGAFFSGIFWSSFVGGGVLTLLVEVSNIFLTIRMMMKISNAQDHLLYRVNKYVNLVMYFLFRLAPQAYLTHFFLRYVNQRTLGTFLLGILLMLDVMIIIYFSRLLRSDFCPEHVPKKQHKDKFLTE

SEQ ID NO: 37155 - protein, 53 aa, Homo sapiens
  REGION 1..53: note = ENSP00000468670
  VARIANT 1: note = Any amino acid
XGGGVLTLLVEVSNIFLTIRMMMKISNAQDHLLYRVNKGPWAPSCWVSCSCWT

SEQ ID NO: 37156 - protein, 200 aa, Homo sapiens
  REGION 1..200: note = ENSP00000378391
MGYSAVPKCPPRGRGRDSVWQTPDMLVEIETAWSLSGYLLVCFSAGYFIHDTVDIVASGQTRASWEYLVHHVMAMGAFFSGIFWSSFVGGGVLTLLVEVSNIFLTIRMMMKISNAQDHLLYRVNKYVNLVMYFLFRLAPQAYLTHFFLRYVNQRTLGTFLLGILLMLDVMIIIYFSRLLRSDFCPEHVPKKQHKDKFLTE

SEQ ID NO: 37157 - protein, 147 aa, Homo sapiens
  REGION 1..147: note = ENSP00000466264
MLVEIETAWSLSGYLLVCFSAGYFIHDTVDIVASGQTRASWEYLVHHVMAMGAFFSGIFWSSFVGGGVLTLLVEVSNIFLTIRMMMKISNAQDHLLYRVNKYVNLVMYFLFRLAPQAYLTHFFLRYVNQRTLGTFLLGILLMLDVMI

SEQ ID NO: 37158 - protein, 773 aa, Homo sapiens
  REGION 1..773: note = ENSP00000365735
MIRDLSKMYPQTRHPAPHQPAQPFKFTISESCDRIKEEFQFLQAQYHSLKLECEKLASEKTEMQRHYVMYYEMSYGLNIEMHKQAEIVKRLNAICAQVIPFLSQEHQQQVVQAVERAKQVTMAELNAIIGQQLQAQHLSHGHGLPVPLTPHPSGLQPPAIPPIGSSAGLLALSSALGGQSHLPIKDEKKHHDNDHQRDRDSIKSSSVSPSASFRGAEKHRNSADYSSESKKQKTEEKEIAARYDSDGEKSDDNLVVDVSNEDPSSPRGSPAHSPRENGLDKTRLLKKDAPISPASIASSSSTPSSKSKELSLNEKSTTPVSKSNTPTPRTDAPTPGSNSTPGLRPVPGKPPGVDPLASSLRTPMAVPCPYPTPFGIVPHAGMNGELTSPGAAYAGLHNISPQMSAAAAAAAAAAAYGRSPVVGFDPHHHMRVPAIPPNLTGIPGGKPAYSFHVSADGQMQPVPFPPDALIGPGIPRHARQINTLNHGEVVCAVTISNPTRHVYTGGKGCVKVWDISHPGNKSPVSQLDCLNRDNYIRSCRLLPDGRTLIVGGEASTLSIWDLAAPTPRIKAELTSSAPACYALAISPDSKVCFSCCSDGNIAVWDLHNQTLVRQFQGHTDGASCIDISNDGTKLWTGGLDNTVRSWDLREGRQLQQHDFTSQIFSLGYCPTGEWLAVGMENSNVEVLHVTKPDKYQLHLHESCVLSLKFAHCGKWFVSTGKDNLLNAWRTPYGASIFQSKESSSVLSCDISVDDKYIVTGSGDKKATVYEVIY

SEQ ID NO: 37159 - protein, 101 aa, Homo sapiens
  REGION 1..101: note = ENSP00000417906
MIRDLSKMYPQTRHPAPHQPAQPFKFTISESCDRIKEEFQFLQAQYHSLKLECEKLASEKTEMQRHYVMYYEMSYGLNIEMHKQVSYFFITILNDSNTGTL

SEQ ID NO: 37160 - protein, 90 aa, Homo sapiens
  REGION 1..90: note = ENSP00000417245
MIRDLSKMYPQTRHPAPHQPAQPFKFTISESCDRIKEEFQFLQAQYHSLKLECEKLASEKTEMQRHYVMYYEMSYGLNIEMHKQRLFFTN

SEQ ID NO: 37161 - protein, 224 aa, Homo sapiens
  REGION 1..224: note = ENSP00000415423
MIRDLSKMYPQTRHPAPHQPAQPFKFTISESCDRIKEEFQFLQAQYHSLKLECEKLASEKTEMQRHYVMYYEMSYGLNIEMHKQAEIVKRLNAICAQVIPFLSQEHQQQVVQAVERAKQVTMAELNAIIGEKKNKSDTPGSLKQQQLQAQHLSHGHGLPVPLTPHPSGLQPPAIPPIGSSAGLLALSSALGGQSHLPIKDEKKHHDNDHQRGEQRLHQELFSIP

SEQ ID NO: 37162 - protein, 128 aa, Homo sapiens
  REGION 1..128: note = ENSP00000397822
MIRDLSKMYPQTRHPAPHQPAQPFKFTISESCDRIKEEFQFLQAQYHSLKLECEKLASEKTEMQRHYVMAEIVKRLNAICAQVIPFLSQEHQQQVVQAVERAKQVTMAELNAIIGQQQLQAQHLSHGH

SEQ ID NO: 37163 - protein, 805 aa, Homo sapiens
  REGION 1..805: note = ENSP00000365720
MIRDLSKMYPQTRHPAPHQPAQPFKFTISESCDRIKEEFQFLQAQYHSLKLECEKLASEKTEMQRHYVMYYEMSYGLNIEMHKQAEIVKRLNAICAQVIPFLSQEHQQQVVQAVERAKQVTMAELNAIIGQQLQAQHLSHGHGLPVPLTPHPSGLQPPAIPPIGSSAGLLALSSALGGQSHLPIKDEKKHHDNDHQRDRDSIKSSSVSPSASFRGAEKHRNSADYSSESKKQKTEEKEIAARYDSDGEKSDDNLVVDVSNEDPSSPRGSPAHSPRENGLDKTRLLKKDAPISPASIASSSSTPSSKSKELSLKRDMGKLSETRLSEDEQCTLGLQRWFCRLWFMNEKSTTPVSKSNTPTPRTDAPTPGSNSTPGLRPVPGKPPGVDPLASSLRTPMAVPCPYPTPFGIVPHAGMNGELTSPGAAYAGLHNISPQMSAAAAAAAAAAAYGRSPVVGFDPHHHMRVPAIPPNLTGIPGGKPAYSFHVSADGQMQPVPFPPDALIGPGIPRHARQINTLNHGEVVCAVTISNPTRHVYTGGKGCVKVWDISHPGNKSPVSQLDCLNRDNYIRSCRLLPDGRTLIVGGEASTLSIWDLAAPTPRIKAELTSSAPACYALAISPDSKVCFSCCSDGNIAVWDLHNQTLVRQFQGHTDGASCIDISNDGTKLWTGGLDNTVRSWDLREGRQLQQHDFTSQIFSLGYCPTGEWLAVGMENSNVEVLHVTKPDKYQLHLHESCVLSLKFAHCGKWFVSTGKDNLLNAWRTPYGASIFQSKESSSVLSCDISVDDKYIVTGSGDKKATVYEVIY

SEQ ID NO: 37164 - protein, 259 aa, Homo sapiens
  REGION 1..259: note = ENSP00000417715
MIRDLSKMYPQTRHPAPHQPAQPFKFTISESCDRIKEEFQFLQAQYHSLKLECEKLASEKTEMQRHYVMYYEMSYGLNIEMHKQAEIVKRLNAICAQVIPFLSQEHQQQVVQAVERAKQVTMAELNAIIGQQLQAQHLSHGHGLPVPLTPHPSGLQPPAIPPIGSSAGLLALSSALGGQSHLPIKDEKKHHDNDHQRDRDSIKQNYLLLIMDEIGDQRGRTFWVPVSLNPDFKRHSPAMLVLCASTELFSIPISQFPRC

SEQ ID NO: 37165 - protein, 748 aa, Homo sapiens
  REGION 1..748: note = ENSP00000265284
MIRDLSKMYPQTRHPAPHQPAQPFKFTISESCDRIKEEFQFLQAQYHSLKLECEKLASEKTEMQRHYVMYYEMSYGLNIEMHKQAEIVKRLNAICAQVIPFLSQEQQLQAQHLSHGHGLPVPLTPHPSGLQPPAIPPIGSSAGLLALSSALGGQSHLPIKDEKKHHDNDHQRDRDSIKSSSVSPSASFRGAEKHRNSADYSSESKKQKTEEKEIAARYDSDGEKSDDNLVVDVSNEDPSSPRGSPAHSPRENGLDKTRLLKKDAPISPASIASSSSTPSSKSKELSLNEKSTTPVSKSNTPTPRTDAPTPGSNSTPGLRPVPGKPPGVDPLASSLRTPMAVPCPYPTPFGIVPHAGMNGELTSPGAAYAGLHNISPQMSAAAAAAAAAAAYGRSPVVGFDPHHHMRVPAIPPNLTGIPGGKPAYSFHVSADGQMQPVPFPPDALIGPGIPRHARQINTLNHGEVVCAVTISNPTRHVYTGGKGCVKVWDISHPGNKSPVSQLDCLNRDNYIRSCRLLPDGRTLIVGGEASTLSIWDLAAPTPRIKAELTSSAPACYALAISPDSKVCFSCCSDGNIAVWDLHNQTLVRQFQGHTDGASCIDISNDGTKLWTGGLDNTVRSWDLREGRQLQQHDFTSQIFSLGYCPTGEWLAVGMENSNVEVLHVTKPDKYQLHLHESCVLSLKFAHCGKWFVSTGKDNLLNAWRTPYGASIFQSKESSSVLSCDISVDDKYIVTGSGDKKATVYEVIY

SEQ ID NO: 37166 - protein, 195 aa, Homo sapiens
  REGION 1..195: note = ENSP00000412567
MARVPPTGQFRFRAPHQPAQPFKFTISESCDRIKEEFQFLQAQYHSLKLECEKLASEKTEMQRHYVMYYEMSYGLNIEMHKQAEIVKRLNAICAQVIPFLSQEHQQQVVQAVERAKQVTMAELNAIIGQQLQAQHLSHGHGLPVPLTPHPSGLQPPAIPPIGSSAGLLALSSALGGQSHLPIKDEKKHHDNDHQR

SEQ ID NO: 37167 - protein, 322 aa, Homo sapiens
  REGION 1..322: note = ENSP00000409313
APHQPAQPFKFTISESCDRIKEEFQFLQAQYHSLKLECEKLASEKTEMQRHYVMYYEMSYGLNIEMHKQAEIVKRLNAICAQVIPFLSQEHQQQVVQAVERAKQVTMAELNAIIGQQLQAQHLSHGHGLPVPLTPHPSGLQPPAIPPIGSSAGLLALSSALGGQSHLPIKDEKKHHDNDHQRDRDSIKSSSVSPSASFRGAEKHRNSADYSSESKKQKTEEKEIAARYDSDGEKSDDNLVVDVSNEKRDMGKLSETRLSEDEQCTLGLQRWFCRLWFMNEKSTTPVSKSNTPTPRTDAPTPGSNSTPGLRPVPGKPPGVDPL

SEQ ID NO: 37168 - protein, 239 aa, Homo sapiens
  REGION 1..239: note = ENSP00000417844
QQLQAQHLSHGHGLPVPLTPHPSGLQPPAIPPIGSSAGLLALSSALGGQSHLPIKDEKKHHDNDHQRDRDSIKSSSVSPSASFRGAEKHRNSADYSSESKKQKTEEKEIAARYDSDGEKSDDNLVVDVSNENEKSTTPVSKSNTPTPRTDAPTPGSNSTPGLRPVPGKPPGVDPLASSLRTPMAVPCPYPTPFGIVPHAGMNGELTSPGAAYAGLHNISPQMSAAAAAAAAAAAYGRSP

SEQ ID NO: 37169 - protein, 165 aa, Homo sapiens
  REGION 1..165: note = ENSP00000418409
SSSVSPSASFRGAEKHRNSADYSSESKKQKTEEKEIAARYNEKSTTPVSKSNTPTPRTDAPTPGSNSTPGLRPVPGKPPGVDPLASSLRTPMAVPCPYPTPFGIVPHAGMNGELTSPGAAYAGLHNISPQMSAAAAAAAAAAAYGRSPVVGFDPHHHMRVPAIPP

SEQ ID NO: 37170 - protein, 343 aa, Homo sapiens
  REGION 1..343: note = ENSP00000417102
  VARIANT 1: note = Any amino acid
XASFRGAEKHRNSADYSSESKKQKTEEKEIAARYDSDGEKSDDNLVVDVSNEDPSSPRGSPAHSPRENGLDKTRLLKKDAPISPASIASSSSTPSSKSKELSLNEKSTTPVSKSNTPTPRTDAPTPGSNSTPGLRPVPGKPPGVDPLASSLRTPMAVPCPYPTPFGIVPHAGMNGELTSPGAAYAGLHNISPQMSAAAAAAAAAAAYGRSPVVGFDPHHHMRVPAIPPNLTGIPGGKPTKCFYHLRAFPGNELEMELPRDTHRAYSFHVSADGQMQPVPFPPDALIGPGIPRHARQINTLNHGEVVCAVTISNPTRHVYTGGKGCVKVWDISHPGNKSPVSQL

SEQ ID NO: 37171 - protein, 211 aa, Homo sapiens
  REGION 1..211: note = ENSP00000400334
  VARIANT 1: note = Any amino acid
XSPAHSPRENGLDKTRLLKKDAPISPASIASSSSTPSSKSKELSLKRDMGKLSETRLSEDEQCTLGLQRWFCRLWFMNEKSTTPVSKSNTPTPRTDAPTPGSNSTPGLRPVPGKPPGVDPLASSLRTPMAVPCPYPTPFGIVPHAGMNGELTSPGAAYAGLHNISPQMSAAAAAAAAAAAYGRSPVVGFDPHHHMRVPAIPPNLTGIPGGK

SEQ ID NO: 37172 - protein, 704 aa, Homo sapiens
  REGION 1..704: note = ENSP00000365727
MIRDLSKMYPQTRHPAPHQPAQPFKFTISESCDRIKEEFQFLQAQYHSLKLECEKLASEKTEMQRHYVMYYEMSYGLNIEMHKQAEIVKRLNAICAQVIPFLSQEHQQQVVQAVERAKQVTMAELNAIIGQQLQAQHLSHGHGLPVPLTPHPSGLQPPAIPPIGSSAGLLALSSALGGQSHLPIKDEKKHHDNDHQRDRDSIKSSSVSPSASFRGAEKHRNSADYSSESKKQKTEEKEIAARYNEKSTTPVSKSNTPTPRTDAPTPGSNSTPGLRPVPGKPPGVDPLASSLRTPMAVPCPYPTPFGIVPHAGMNGELTSPGAAYAGLHNISPQMSAAAAAAAAAAAYGRSPVVGFDPHHHMRVPAIPPNLTGIPGGKPAYSFHVSADGQMQPVPFPPDALIGPGIPRHARQINTLNHGEVVCAVTISNPTRHVYTGGKGCVKVWDISHPGNKSPVSQLDCLNRDNYIRSCRLLPDGRTLIVGGEASTLSIWDLAAPTPRIKAELTSSAPACYALAISPDSKVCFSCCSDGNIAVWDLHNQTLVRQFQGHTDGASCIDISNDGTKLWTGGLDNTVRSWDLREGRQLQQHDFTSQIFSLGYCPTGEWLAVGMENSNVEVLHVTKPDKYQLHLHESCVLSLKFAHCGKWFVSTGKDNLLNAWRTPYGASIFQSKESSSVLSCDISVDDKYIVTGSGDKKATVYEVIY

SEQ ID NO: 37173 - protein, 572 aa, Homo sapiens
  REGION 1..572: note = ENSP00000246112
MTSRDQPRPKGPPKSTSPCPGISNSESSPTLNYQGILNRLKQFPRFSPHFAAELESIYYSLHKIQQDVAEHHKQIGNVLQIVESCSQLQGFQSEEVSPAEPASPGTPQQVKDKTLQESSFEDIMATRSSDWLRRPLGEDNQPETQLFWDKEPWFWHDTLTEQLWRIFAGVHDEKAKPRDRQQAPGLGQESKAPGSCDPGTDPCPEDASTPRPPEASSSPPEGSQDRNTSWGVVQEPPGRASRFLQSISWDPEDFEDAWKRPDALPGQSKRLAVPCKLEKMRILAHGELVLATAISSFTRHVFTCGRRGIKVWSLTGQVAEDRFPESHLPIQTPGAFLRTCLLSSNSRSLLTGGYNLASVSVWDLAAPSLHVKEQLPCAGLNCQALDANLDANLAFASFTSGVVRIWDLRDQSVVRDLKGYPDGVKSIVVKGYNIWTGGPDACLRCWDQRTIMKPLEYQFKSQIMSLSHSPQEDWVLLGMANGQQWLQSTSGSQRHMVGQKDSVILSVKFSPFGQWWASVGMDDFLGVYSMPAGTKVFEVPEMSPVTCCDVSSNNRLVVTGSGEHASVYQITY

SEQ ID NO: 37174 - protein, 154 aa, Homo sapiens
  REGION 1..154: note = ENSP00000411783
MTSRDQPRPKGPPKSTSPCPGISNSESSPTLNYQGILNRLKQFPRFSPHFAAELESIYYSLHKIQQDVAEHHKQIGNVLQIVESCSQLQGFQSEEVSPAEPASPGTPQQVKDKTLQESSFEDIMATRSSDWLRRPLGEDNQPETQLFWDKEPWF

SEQ ID NO: 37175 - protein, 45 aa, Homo sapiens
  REGION 1..45: note = ENSP00000467126
MTSRDQPRPKGPPKSTSPCPGISNSESSPTLNYQGILNRLKQFPR

SEQ ID NO: 37176 - protein, 449 aa, Homo sapiens
  REGION 1..449: note = ENSP00000406893
MATRSSDWLRRPLGEDNQPETQLFWDKEPWFWHDTLTEQLWRIFAGVHDEKAKPRDRQQAPGLGQESKAPGSCDPGTDPCPEDASTPRPPEASSSPPEGSQDRNTSWGVVQEPPGRASRFLQSISWDPEDFEDAWKRPDALPGQSKRLAVPCKLEKMRILAHGELVLATAISSFTRHVFTCGRRGIKVWSLTGQVAEDRFPESHLPIQTPGAFLRTCLLSSNSRSLLTGGYNLASVSVWDLAAPSLHVKEQLPCAGLNCQALDANLDANLAFASFTSGVVRIWDLRDQSVVRDLKGYPDGVKSIVVKGYNIWTGGPDACLRCWDQRTIMKPLEYQFKSQIMSLSHSPQEDWVLLGMANGQQWLQSTSGSQRHMVGQKDSVILSVKFSPFGQWWASVGMDDFLGVYSMPAGTKVFEVPEMSPVTCCDVSSNNRLVVTGSGEHASVYQITY

SEQ ID NO: 37177 - protein, 1013 aa, Homo sapiens
  REGION 1..1013: note = ENSP00000061240
MGLGTLSPRMLVWLVASGIVFYGELWVCAGLDYDYTFDGNEEDKTETIDYKDPCKAAVFWGDIALDDEDLNIFQIDRTIDLTQNPFGNLGHTTGGLGDHAMSKKRGALYQLIDRIRRIGFGLEQNNTVKGKVPLQFSGQNEKNRVPRAATSRTERIWPGGVIPYVIGGNFTGSQRAMFKQAMRHWEKHTCVTFIERSDEESYIVFTYRPCGCCSYVGRRGNGPQAISIGKNCDKFGIVVHELGHVIGFWHEHTRPDRDNHVTIIRENIQPGQEYNFLKMEPGEVNSLGERYDFDSIMHYARNTFSRGMFLDTILPSRDDNGIRPAIGQRTRLSKGDIAQARKLYRCPACGETLQESNGNLSSPGFPNGYPSYTHCIWRVSVTPGEKIVLNFTTMDLYKSSLCWYDYIEVRDGYWRKSPLLGRFCGDKLPEVLTSTDSRMWIEFRSSSNWVGKGFAAVYEAICGGEIRKNEGQIQSPNYPDDYRPMKECVWKITVSESYHVGLTFQSFEIERHDNCAYDYLEVRDGTSENSPLIGRFCGYDKPEDIRSTSNTLWMKFVSDGTVNKAGFAANFFKEEDECAKPDRGGCEQRCLNTLGSYQCACEPGYELGPDRRSCEAACGGLLTKLNGTITTPGWPKEYPPNKNCVWQVVAPTQYRISVKFEFFELEGNEVCKYDYVEIWSGLSSESKLHGKFCGAEVPEVITSQFNNMRIEFKSDNTVSKKGFKAHFFSDKDECSKDNGGCQHECVNTMGSYMCQCRNGFVLHDNKHDCKEAECEQKIHSPSGLITSPNWPDKYPSRKECTWEISATPGHRIKLAFSEFEIEQHQECAYDHLEVFDGETEKSPILGRLCGNKIPDPLVATGNKMFVRFVSDASVQRKGFQATHSTECGGRLKAESKPRDLYSHAQFGDNNYPGQVDCEWLLVSERGSRLELSFQTFEVEEEADCGYDYVELFDGLDSTAVGLGRFCGSGPPEEIYSIGDSVLIHFHTDDTINKKGFHIRYKSIRYPDTTHTKK

SEQ ID NO: 37178 - protein, 130 aa, Homo sapiens
  REGION 1..130: note = ENSP00000422692
MGLGTLSPRMLVWLVASGIVFYGELWVCAGLDYDYTFDGNEEDKTETIDYKDPCKAAVFWGDIALDDEDLNIFQIDRTIDLTQNPFGNLGHTTGGLGDHAMSKKRGALYQLIDRIRRIGFGISMFKVADA

SEQ ID NO: 37179 - protein, 1036 aa, Homo sapiens
  REGION 1..1036: note = ENSP00000426082
MGLGTLSPRMLVWLVASGIVFYGELWVCAGLDYDYTFDGNEEDKTETIDYKDPCKAAVFWGDIALDDEDLNIFQIDRTIDLTQNPFGNLGHTTGGLGDHAMSKKRGALYQLIDRIRRIGFGLEQNNTVKGKVPLQFSGQNEKNRVPRAATSRTERIWPGGVIPYVIGGNFTGSQRAMFKQAMRHWEKHTCVTFIERSDEESYIVFTYRPCGCCSYVGRRGNGPQAISIGKNCDKFGIVVHELGHVIGFWHEHTRPDRDNHVTIIRENIQPGQEYNFLKMEPGEVNSLGERYDFDSIMHYARNTFSRGMFLDTILPSRDDNGIRPAIGQRTRLSKGDIAQARKLYRCPACGETLQESNGNLSSPGFPNGYPSYTHCIWRVSVTPGEKIVLNFTTMDLYKSSLCWYDYIEVRDGYWRKSPLLGRFCGDKLPEVLTSTDSRMWIEFRSSSNWVGKGFAAVYEAICGGEIRKNEGQIQSPNYPDDYRPMKECVWKITVSESYHVGLTFQSFEQEHQENPGIASKARESLILIWKPIERHDNCAYDYLEVRDGTSENSPLIGRFCGYDKPEDIRSTSNTLWMKFVSDGTVNKAGFAANFFKEEDECAKPDRGGCEQRCLNTLGSYQCACEPGYELGPDRRSCEAACGGLLTKLNGTITTPGWPKEYPPNKNCVWQVVAPTQYRISVKFEFFELEGNEVCKYDYVEIWSGLSSESKLHGKFCGAEVPEVITSQFNNMRIEFKSDNTVSKKGFKAHFFSDKDECSKDNGGCQHECVNTMGSYMCQCRNGFVLHDNKHDCKEAECEQKIHSPSGLITSPNWPDKYPSRKECTWEISATPGHRIKLAFSEFEIEQHQECAYDHLEVFDGETEKSPILGRLCGNKIPDPLVATGNKMFVRFVSDASVQRKGFQATHSTECGGRLKAESKPRDLYSHAQFGDNNYPGQVDCEWLLVSERGSRLELSFQTFEVEEEADCGYDYVELFDGLDSTAVGLGRFCGSGPPEEIYSIGDSVLIHFHTDDTINKKGFHIRYKSIRYPDTTHTKK

SEQ ID NO: 37180 - protein, 57 aa, Homo sapiens
  REGION 1..57: note = ENSP00000421732
MGLGTLSPRMLVWLVASGIVFYGELWVCAGLDYDYTFDGNEEDKTETIDYKDPCKAD

SEQ ID NO: 37181 - protein, 392 aa, Homo sapiens
  REGION 1..392: note = ENSP00000422937
MGLGTLSPRMLVWLVASGIVFYGELWVCAGLDYDYTFDGNEEDKTETIDYKDPCKAAVFWGDIALDDEDLNIFQIDRTIDLTQNPFGNLGHTTGGLGDHAMSKKRGALYQLIDRIRRIGFGLEQNNTVKGKVPLQFSGQNEKNRVPRAATSRTERIWPGGVIPYVIGGNFTGSQRAMFKQAMRHWEKHTCVTFIERSDEESYIVFTYRPCGCCSYVGRRGNGPQAISIGKNCDKFGIVVHELGHVIGFWHEHTRPDRDNHVTIIRENIQPGQEYNFLKMEPGEVNSLGERYDFDSIMHYARNTFSRGMFLDTILPSRDDNGIRPAIGQRTRLSKGDIAQARKLYRCPACGETLQESNGNLSSPGFPNGYPSYTHCIWRVSVTPGEKVVFSLC

SEQ ID NO: 37182 - protein, 110 aa, Homo sapiens
  REGION 1..110: note = ENSP00000423748
MSKKRGALYQLIDRIRRIGFGLEQNNTVKGKVPLQFSGQNEKNRVPRAATSRTERIWPGGVIPYVIGGNFTGSQRAMFKQAMRHWEKHTCVTFIERSDEESYIVFTYRPC

SEQ ID NO: 37183 - protein, 904 aa, Homo sapiens
  REGION 1..904: note = ENSP00000296795
MRQTLPCIYFWGGLLPFGMLCASSTTKCTVSHEVADCSHLKLTQVPDDLPTNITVLNLTHNQLRRLPAANFTRYSQLTSLDVGFNTISKLEPELCQKLPMLKVLNLQHNELSQLSDKTFAFCTNLTELHLMSNSIQKIKNNPFVKQKNLITLDLSHNGLSSTKLGTQVQLENLQELLLSNNKIQALKSEELDIFANSSLKKLELSSNQIKEFSPGCFHAIGRLFGLFLNNVQLGPSLTEKLCLELANTSIRNLSLSNSQLSTTSNTTFLGLKWTNLTMLDLSYNNLNVVGNDSFAWLPQLEYFFLEYNNIQHLFSHSLHGLFNVRYLNLKRSFTKQSISLASLPKIDDFSFQWLKCLEHLNMEDNDIPGIKSNMFTGLINLKYLSLSNSFTSLRTLTNETFVSLAHSPLHILNLTKNKISKIESDAFSWLGHLEVLDLGLNEIGQELTGQEWRGLENIFEIYLSYNKYLQLTRNSFALVPSLQRLMLRRVALKNVDSSPSPFQPLRNLTILDLSNNNIANINDDMLEGLEKLEILDLQHNNLARLWKHANPGGPIYFLKGLSHLHILNLESNGFDEIPVEVFKDLFELKIIDLGLNNLNTLPASVFNNQVSLKSLNLQKNLITSVEKKVFGPAFRNLTELDMRFNPFDCTCESIAWFVNWINETHTNIPELSSHYLCNTPPHYHGFPVRLFDTSSCKDSAPFELFFMINTSILLIFIFIVLLIHFEGWRISFYWNVSVHRVLGFKEIDRQTEQFEYAAYIIHAYKDKDWVWEHFSSMEKEDQSLKFCLEERDFEAGVFELEAIVNSIKRSRKIIFVITHHLLKDPLCKRFKVHHAVQQAIEQNLDSIILVFLEEIPDYKLNHALCLRRGMFKSHCILNWPVQKERIGAFRHKLQVALGSKNSVH

SEQ ID NO: 37184 - protein, 351 aa, Homo sapiens
  REGION 1..351: note = ENSP00000423386
MRQTLPCIYFWGGLLPFGMLCASSTTKCTVSHEVADCSHLKLTQVPDDLPTNITVLNLTHNQLRRLPAANFTRYSQLTSLDVGFNTISKLEPELCQKLPMLKVLNLQHNELSQLSDKTFAFCTNLTELHLMSNSIQKIKNNPFVKQKNLITLDLSHNGLSSTKLGTQVQLENLQELLLSNNKIQALKSEELDIFANSSLKKLELSSNQIKEFSPGCFHAIGRLFGLFLNNVQLGPSLTEKLCLELANTSIRNLSLSNSQLSTTSNTTFLGLKWTNLTMLDLSYNNLNVWLKCLEHLNMEDNDIPGIKSNMFTGLINLKYLSLSNSFTSLRTLTNETFVSLAHSPLHILNLT

SEQ ID NO: 37185 - protein, 627 aa, Homo sapiens
  REGION 1..627: note = ENSP00000423684
MLDLSYNNLNVVGNDSFAWLPQLEYFFLEYNNIQHLFSHSLHGLFNVRYLNLKRSFTKQSISLASLPKIDDFSFQWLKCLEHLNMEDNDIPGIKSNMFTGLINLKYLSLSNSFTSLRTLTNETFVSLAHSPLHILNLTKNKISKIESDAFSWLGHLEVLDLGLNEIGQELTGQEWRGLENIFEIYLSYNKYLQLTRNSFALVPSLQRLMLRRVALKNVDSSPSPFQPLRNLTILDLSNNNIANINDDMLEGLEKLEILDLQHNNLARLWKHANPGGPIYFLKGLSHLHILNLESNGFDEIPVEVFKDLFELKIIDLGLNNLNTLPASVFNNQVSLKSLNLQKNLITSVEKKVFGPAFRNLTELDMRFNPFDCTCESIAWFVNWINETHTNIPELSSHYLCNTPPHYHGFPVRLFDTSSCKDSAPFELFFMINTSILLIFIFIVLLIHFEGWRISFYWNVSVHRVLGFKEIDRQTEQFEYAAYIIHAYKDKDWVWEHFSSMEKEDQSLKFCLEERDFEAGVFELEAIVNSIKRSRKIIFVITHHLLKDPLCKRFKVHHAVQQAIEQNLDSIILVFLEEIPDYKLNHALCLRRGMFKSHCILNWPVQKERIGAFRHKLQVALGSKNSVH

SEQ ID NO: 37186 - protein, 799 aa, Homo sapiens
  REGION 1..799: note = ENSP00000377997
MELNFYKIPDNLPFSTKNLDLSFNPLRHLGSYSFFSFPELQVLDLSRCEIQTIEDGAYQSLSHLSTLILTGNPIQSLALGAFSGLSSLQKLVAVETNLASLENFPIGHLKTLKELNVAHNLIQSFKLPEYFSNLTNLEHLDLSSNKIQSIYCTDLRVLHQMPLLNLSLDLSLNPMNFIQPGAFKEIRLHKLTLRNNFDSLNVMKTCIQGLAGLEVHRLVLGEFRNEGNLEKFDKSALEGLCNLTIEEFRLAYLDYYLDDIIDLFNCLTNVSSFSLVSVTIERVKDFSYNFGWQHLELVNCKFGQFPTLKLKSLKRLTFTSNKGGNAFSEVDLPSLEFLDLSRNGLSFKGCCSQSDFGTTSLKYLDLSFNGVITMSSNFLGLEQLEHLDFQHSNLKQMSEFSVFLSLRNLIYLDISHTHTRVAFNGIFNGLSSLEVLKMAGNSFQENFLPDIFTELRNLTFLDLSQCQLEQLSPTAFNSLSSLQVLNMSHNNFFSLDTFPYKCLNSLQVLDYSLNHIMTSKKQELQHFPSSLAFLNLTQNDFACTCEHQSFLQWIKDQRQLLVEVERMECATPSDKQGMPVLSLNITCQMNKTIIGVSVLSVLVVSVVAVLVYKFYFHLMLLAGCIKYGRGENIYDAFVIYSSQDEDWVRNELVKNLEEGVPPFQLCLHYRDFIPGVAIAANIIHEGFHKSRKVIVVVSQHFIQSRWCIFEYEIAQTWQFLSSRAGIIFIVLQKVEKTLLRQQVELYRLLSRNTYLEWEDSVLGRHIFWRRLRKALLDGKSWNPEGTVGTGCNWQEATSI

SEQ ID NO: 37187 - protein, 839 aa, Homo sapiens
  REGION 1..839: note = ENSP00000363089
MMSASRLAGTLIPAMAFLSCVRPESWEPCVEVVPNITYQCMELNFYKIPDNLPFSTKNLDLSFNPLRHLGSYSFFSFPELQVLDLSRCEIQTIEDGAYQSLSHLSTLILTGNPIQSLALGAFSGLSSLQKLVAVETNLASLENFPIGHLKTLKELNVAHNLIQSFKLPEYFSNLTNLEHLDLSSNKIQSIYCTDLRVLHQMPLLNLSLDLSLNPMNFIQPGAFKEIRLHKLTLRNNFDSLNVMKTCIQGLAGLEVHRLVLGEFRNEGNLEKFDKSALEGLCNLTIEEFRLAYLDYYLDDIIDLFNCLTNVSSFSLVSVTIERVKDFSYNFGWQHLELVNCKFGQFPTLKLKSLKRLTFTSNKGGNAFSEVDLPSLEFLDLSRNGLSFKGCCSQSDFGTTSLKYLDLSFNGVITMSSNFLGLEQLEHLDFQHSNLKQMSEFSVFLSLRNLIYLDISHTHTRVAFNGIFNGLSSLEVLKMAGNSFQENFLPDIFTELRNLTFLDLSQCQLEQLSPTAFNSLSSLQVLNMSHNNFFSLDTFPYKCLNSLQVLDYSLNHIMTSKKQELQHFPSSLAFLNLTQNDFACTCEHQSFLQWIKDQRQLLVEVERMECATPSDKQGMPVLSLNITCQMNKTIIGVSVLSVLVVSVVAVLVYKFYFHLMLLAGCIKYGRGENIYDAFVIYSSQDEDWVRNELVKNLEEGVPPFQLCLHYRDFIPGVAIAANIIHEGFHKSRKVIVVVSQHFIQSRWCIFEYEIAQTWQFLSSRAGIIFIVLQKVEKTLLRQQVELYRLLSRNTYLEWEDSVLGRHIFWRRLRKALLDGKSWNPEGTVGTGCNWQEATSI

SEQ ID NO: 37188 - protein, 171 aa, Homo sapiens
  REGION 1..171: note = ENSP00000391674
MKKCLLPVLITCMQTAICKDRMMMIMILLVNYRPDEFIECEDPVDHVGNATASQELGYGCLKFGGQAYSDVEHTSVQCHALDGIECASPRTFLRENKPCIKYTGHYFITTLLYSFFLGCFGVDRFCLGHTGTAVGKLLTLGGLGIWWFVDLILLITGGLMPSDGSNWCTVY

SEQ ID NO: 37189 - protein, 214 aa, Homo sapiens
  REGION 1..214: note = ENSP00000416050
MVLGGCPVSYLLLCGQAALLLGNLLLLHCVSRSHSQNATAEPELTSAGAAQPEGPGGAASWEYGDPHSPVILCSYLPDEFIECEDPVDHVGNATASQELGYGCLKFGGQAYSDVEHTSVQCHALDGIECASPRTFLRENKPCIKYTGHYFITTLLYSFFLGCFGVDRFCLGHTGTAVGKLLTLGGLGIWWFVDLILLITGGLMPSDGSNWCTVY

SEQ ID NO: 37190 - protein, 171 aa, Homo sapiens; identical to SEQ ID NO: 37188
  REGION 1..171: note = ENSP00000380260

SEQ ID NO: 37191 - protein, 120 aa, Homo sapiens
  REGION 1..120: note = ENSP00000428394
MKKCLLPVLITCMQTAICKDRMMMIMILLVNYRPDEFIECEDPVDHVGNATASQELGYGCLKFGGQAYSDVEHTSVQCHALDGIECASPRTFLRENKPCIKYTGHYFITTLLYSFFLGCF

SEQ ID NO: 37192 - protein, 62 aa, Homo sapiens
  REGION 1..62: note = ENSP00000430685
MKKCLLPVLITCMQTAICKDRMMMIMILLVNYRPDEFIECEDPVDHVGNATASQELGYGCLK

SEQ ID NO: 37193 - protein, 45 aa, Homo sapiens
  REGION 1..45: note = ENSP00000428203
MKKCLLPVLITCMQTAICKDRMMMIMILLVNYRPDEFIECEDPVD

SEQ ID NO: 37194 - protein, 202 aa, Homo sapiens
  REGION 1..202: note = ENSP00000304277
MCYGKCARCIGHSLVGLALLCIAANILLYFPNGETKYASENHLSRFVWFFSGIVGGGLLMLLPAFVFIGLEQDDCCGCCGHENCGKRCAMLSSVLAALIGIAGSGYCVIVAALGLAEGPLCLDSLGQWNYTFASTEGQYLLDTSTWSECTEPKHIVEWNVSLFSILLALGGIEFILCLIQVINGVLGGICGFCCSHQQQYDC

SEQ ID NO: 37195 - protein, 117 aa, Homo sapiens
  REGION 1..117: note = ENSP00000417084
MLSSVLAALIGIAGSGYCVIVAALGLAEGPLCLDSLGQWNYTFASTEGQYLLDTSTWSECTEPKHIVEWNVSLFSILLALGGIEFILCLIQVINGVLGGICGFCCSHQQVRTCMKMS

SEQ ID NO: 37196 - protein, 101 aa, Homo sapiens
  REGION 1..101: note = ENSP00000419426
MCYGKCARCIGHSLVGLALLCIAANILLYFPNGETKYASENHLSRFVWFFSGIVGGGLLMLLPAFVFIGLEQDDCCGCCGHENCGKRCAVPSGYLHMVRVH

SEQ ID NO: 37197 - protein, 103 aa, Homo sapiens
  REGION 1..103: note = ENSP00000418025
MCYGKCARCIGHSLVGLALLCIAANILLYFPNGETKYASENHLSRFVWFFSGIVGGGLLMLLPAFVFIGLEQDDCCGCCGHENCGKRCAVGPPALVVKMTPKM

SEQ ID NO: 37198 - protein, 760 aa, Homo sapiens
  REGION 1..760: note = ENSP00000297784
MSPKKVQIKVEEKEDETEESSSEEEEEVEDKLPRRESLRPKRKRTRDVINEDDPEPEPEDEETRKAREKERRRRLKRGAEEEEIDEEELERLKAELDEKRQIIATVKCKPWKMEKKIEVLKEAKKFVSENEGALGKGKGKRWFAFKMMMAKKWAKFLRDFENFKAACVPWENKIKAIESQFGSSVASYFLFLRWMYGVNMVLFILTFSLIMLPEYLWGLPYGSLPRKTVPRAEEASAANFGVLYDFNGLAQYSVLFYGYYDNKRTIGWMNFRLPLSYFLVGIMCIGYSFLVVLKAMTKNIGDDGGGDDNTFNFSWKVFTSWDYLIGNPETADNKFNSITMNFKEAITEEKAAQVEENVHLIRFLRFLANFFVFLTLGGSGYLIFWAVKRSQEFAQQDPDTLGWWEKNEMNMVMSLLGMFCPTLFDLFAELEDYHPLIALKWLLGRIFALLLGNLYVFILALMDEINNKIEEEKLVKANITLWEANMIKAYNASFSENSTGPPFFVHPADVPRGPCWETMVGQEFVRLTVSDVLTTYVTILIGDFLRACFVRFCNYCWCWDLEYGYPSYTEFDISGNVLALIFNQGMIWMGSFFAPSLPGINILRLHTSMYFQCWAVMCCNVPEARVFKASRSNNFYLGMLLLILFLSTMPVLYMIVSLPPSFDCGPFSGKNRMFEVIGETLEHDFPSWMAKILRQLSNPGLVIAVILVMVLAIYYLNATAKGQKAANLDLKKKMKMQALENKMRNKKMAAARAAAAAGRQ

SEQ ID NO: 37199 - protein, 760 aa, Homo sapiens; identical to SEQ ID NO: 37198
  REGION 1..760: note = ENSP00000341433

SEQ ID NO: 37200 - protein, 758 aa, Homo sapiens
  REGION 1..758: note = ENSP00000455041
MSESSGSALQPGRPSRQPAVHPENLSLDSSCFSSPPVNFLQELPSYRSIARRRTTVHSRDKQSGTLLKPTDSYSSQLEDRIAENLSSHSLRNYALNISEKRRLRDIQETQMKYLSEWDQWKRYSSKSWKRFLEKAREMTTHLELWREDIRSIEGKFGTGIQSYFSFLRFLVLLNLVIFLIIFMLVLLPVLLTKYKITNSSFVLIPFKDMDKQCTVYPVSSSGLIYFYSYIIDLLSGTGFLEETSLFYGHYTIDGVKFQNFTYDLPLAYLLSTIASLALSLLWIVKRSVEGFKINLIRSEEHFQSYCNKIFAGWDFCITNRSMADLKHSSLRYELRADLEEERMRQKIAERTSEETIRIYSLRLFLNCIVLAVLGACFYAIYVATVFSQEHMKKEIDKMVFGENLFILYLPSIVITLANFITPMIFAKIIRYEDYSPGFEIRLTILRCVFMRLATICVLVFTLGSKITSCDDDTCDLCGYNQKLYPCWETQVGQEMYKLMIFDFIIILAVTLFVDFPRKLLVTYCSSCKLIQCWGQQEFAIPDNVLGIVYGQTICWIGAFFSPLLPAIATLKFIIIFYVKEWSLLYTCRPSPRPFRASNSNFFFLLVLLIGLCLAIIPLTISISRIPSSKACGPFTNFNTTWEVIPKTVSTFPSSLQSFIHGVTSEAFAVPFFMIICLIMFYFIALAGAHKRVVIQLREQLSLVRKHSSRGSWLGTFTQDTARKVLFSWEGVKLLQPSLTTTSPKLCLEAQPRPASLIH

SEQ ID NO: 37201 - protein, 723 aa, Homo sapiens
  REGION 1..723: note = ENSP00000304710
MSESSGSALQPGRPSRQPAVHPENLSLDSSCFSSPPVNFLQELPSYRSIARRRTTVHSRDKQSGTLLKPTDSYSSQLEDRIAENLSSHSLRNYALNISEKRRLRDIQETQMKYLSEWDQWKRYSSKSWKRFLEKAREMTTHLELWREDIRSIEGKFGTGIQSYFSFLRFLVLLNLVIFLIIFMLVLLPVLLTKYKITNSSFVLIPFKDMDKQCTVYPVSSSGLIYFYSYIIDLLSGTGFLEETSLFYGHYTIDGVKFQNFTYDLPLAYLLSTIASLALSLLWIVKRSVEGFKINLIRSEEHFQSYCNKIFAGWDFCITNRSMADLKHSSLRYELRADLEEERMRQKIAERTSEETIRIYSLRLFLNCIVLAVLGACFYAIYVATVFSQEHMKKEIDKMVFGENLFILYLPSIVITLANFITPMIFAKIIRYEDYSPGFEIRLTILRCVFMRLATICVLVFTLGSKITSCDDDTCDLCGYNQKLYPCWETQVGQEMYKLMIFDFIIILAVTLFVDFPRKLLVTYCSSCKLIQCWGQQEFAIPDNVLGIVYGQTICWIGAFFSPLLPAIATLKFIIIFYVKEWSLLYTCRPSPRPFRASNSNFFFLLVLLIGLCLAIIPLTISISRIPSSKACGPFTNFNTTWEVIPKTVSTFPSSLQSFIHGVTSEAFAVPFFMIICLIMFYFIALAGAHKRVVIQLREQLSLESRDKCYLIQKLTEAQRDMRN

SEQ ID NO: 37202 - protein, 613 aa, Homo sapiens
  REGION 1..613: note = ENSP00000397081
MKYLSEWDQWKRYSSKSWKRFLEKAREMTTHLELWREDIRSIEGKFGTGIQSYFSFLRFLVLLNLVIFLIIFMLVLLPVLLTKYKITNSSFVLIPFKDMDKQCTVYPVSSSGLIYFYSYIIDLLSGTGFLEETSLFYGHYTIDGVKFQNFTYDLPLAYLLSTIASLALSLLWIVKRSVEGFKINLIRSEEHFQSYCNKIFAGWDFCITNRSMADLKHSSLRYELRADLEEERMRQKIAERTSEETIRIYSLRLFLNCIVLAVLGACFYAIYVATVFSQEHMKKEIDKMVFGENLFILYLPSIVITLANFITPMIFAKIIRYEDYSPGFEIRLTILRCVFMRLATICVLVFTLGSKITSCDDDTCDLCGYNQKLYPCWETQVGQEMYKLMIFDFIIILAVTLFVDFPRKLLVTYCSSCKLIQCWGQQEFAIPDNVLGIVYGQTICWIGAFFSPLLPAIATLKFIIIFYVKEWSLLYTCRPSPRPFRASNSNFFFLLVLLIGLCLAIIPLTISISRIPSSKACGPFTNFNTTWEVIPKTVSTFPSSLQSFIHGVTSEAFAVPFFMIICLIMFYFIALAGAHKRVVIQLREQLSLESRDKCYLIQKLTEAQRDMRN

SEQ ID NO: 37203 - protein, 134 aa, Homo sapiens
  REGION 1..134: note = ENSP00000395328
MTEEPIKEILGAPKAHMAATMEKSPKSEVVITTVPLVSEIQLMAATGGTELSCYRCIIPFAVVVFIAGIVVTAVAYSFNSHGSIISIFGLVVLSSGLFLLASSALCWKVRQRSKKAKRRESQTALVANQRSLFA

SEQ ID NO: 37204 - protein, 134 aa, Homo sapiens; identical to SEQ ID NO: 37203
  REGION 1..134: note = ENSP00000465638

SEQ ID NO: 37205 - protein, 129 aa, Homo sapiens
  REGION 1..129: note = ENSP00000459290
MTEEPIKEILGAPKAHMAATMEKSPKSEVVITTVPLVSEIQLMAATGGTELSCYRCIIPFAVVVFIAGIVVTAVAYSFNSHGSIISIFGLVVLSSGLFLLASSALCWKVRQRSKKAKRRESQTALVANQ

SEQ ID NO: 37206 - protein, 575 aa, Homo sapiens
  REGION 1..575: note = ENSP00000324651
MKRSLQALYCQLLSFLLILALTEALAFAIQEPSPRESLQVLPSGTPPGTMVTAPHSSTRHTSVVMLTPNPDGPPSQAAAPMATPTPRAEGHPPTHTISTIAATVTAPHSESSLSTGPAPAAMATTSSKPEGRPRGQAAPTILLTKPPGATSRPTTAPPRTTTRRPPRPPGSSRKGAGNSSRPVPPAPGGHSRSKEGQRGRNPSSTPLGQKRPLGKIFQIYKGNFTGSVEPEPSTLTPRTPLWGYSSSPQPQTVAATTVPSNTSWAPTTTSLGPAKDKPGLRRAAQGGGSTFTSQGGTPDATAASGAPVSPQAAPVPSQRPHHGDPQDGPSHSDSWLTVTPGTSRPLSTSSGVFTAATGPTPAAFDTSVSAPSQGIPQGASTTPQAPTHPSRVSESTISGAKEETVATLTMTDRVPSPLSTVVSTATGNFLNRLVPAGTWKPGTAGNISHVAEGDKPQHRATICLSKMDIAWVILAISVPISSCSVLLTVCCMKRKKKTANPENNLSYWNNTITMDYFNRHAVELPREIQSLETSEDQLSEPRSPANGDYRDTGMVLVNPFCQETLFVGNDQVSEI

SEQ ID NO: 37207 - protein, 575 aa, Homo sapiens; identical to SEQ ID NO: 37206
  REGION 1..575: note = ENSP00000376838

SEQ ID NO: 37208 - protein, 89 aa, Homo sapiens
  REGION 1..89: note = ENSP00000422072
MVTAPHSSTRHTSVVMLTPNPDGPPSQAAAPMATPTPRAEGHPPTHTISTIAATVTAPHSESSLSTGPAPAAMATTSSKPEGRPRGQAA

SEQ ID NO: 37209 - protein, 121 aa, Homo sapiens
  REGION 1..121: note = ENSP00000427447
MVTAPHSSTRHTSVVMLTPNPDGPPSQAAAPMATPTPRAEGHPPTHTISTIAATVTAPHSESSLSTGPAPAAMATTSSKPEGRPRGQAAPTILLTKPPGATSRPTTAPPRTTTRRPPRPPG

SEQ ID NO: 37210 - protein, 148 aa, Homo sapiens
  REGION 1..148: note = ENSP00000426301
MKRSLQALYCQLLSFLLILALTEALAFAIQEPSPRESLQVLPSGTPPGTMVTAPHSSTRHTSVVMLTPNPDGPPSQAAAPMATPTPRAEGHPPTHTISTIAATVTAPHSESSLSTGPAPAAMATTSSKPEGRPRGQAAPTILLTKPPG

SEQ ID NO: 37211 - protein, 71 aa, Homo sapiens
  REGION 1..71: note = ENSP00000422196
MKRSLQALYCQLLSFLLILALTEALAFAIQEPSPRESLQVLPSGTPPGTMVTAPHSSTRHTSVVMLTPNPD

SEQ ID NO: 37212 - protein, 105 aa, Homo sapiens
  REGION 1..105: note = ENSP00000424897
MKRSLQALYCQLLTVLLTVCCMKRKKKTANPENNLSYWNNTITMDYFNRHAVELPREIQSLETSEDQLSEPRSPANGDYRDTGMVLVNPFCQETLFVGNDQVSEI

SEQ ID NO: 37213 - protein, 488 aa, Homo sapiens
  REGION 1..488: note = ENSP00000423338
MKRSLQALYCQLLSFLLILALTEALAFAIQEPSPRESLQVLPSGTPPGTMVTAPHSSTRHTSVVMLTPNPDGPPSQAAAPMATPTPRAEGHPPTHTISTIAATVTAPHSESSLSTGPAPAAMATTSSKPEGRPRGQAAPTILLTKPPGATSRPTTAPPRTTTRRPPRPPGSSRKGAGNSSRPVPPAPGGHSRSKEGQRGRNPSSTPLGQKRPLGKIFQIYKGNFTGSVEPEPSTLTPRTPLWGYSSSPQPQTVAATTVPSNTSWAPTTTSLGPAKDKPGLRRAAQGGGSTFTSQGGTPDATAASGAPVSPQAAPVPSQRPHHGDPQDGPSHSDSWLTVTPGTSRPLSTSSGVFTAATGPTPAAFDTSVSAPSQGIPQGASTTPQAPTHPSRVSESTISGAKEETVATLTMTDRVPSPLSTVVSTATGNFLNRLVPAGTWKPGTAGNISHVAEGDKPQHRATICLSKMDIAWVILAISVPISSCSDPIT

SEQ ID NO: 37214 - protein, 153 aa, Homo sapiens
  REGION 1..153: note = ENSP00000421486
MKRSLQALYCQLLSFLLILALTEALAFAIQEPSPRESLQVLPSGTPPGTMVTAPHSSTRHTSVVMLTPNPDGPPSQAAAPMATPTPRAEGHPPTHTISTIAATVTAPHSESSLSTGPAPAAMATTSSKPEGRPRGQAAPTILLTKPPGATSRP

SEQ ID NO: 37215 - protein, 189 aa, Homo sapiens
  REGION 1..189: note = ENSP00000355285
MGLGARGAWAALLLGTLQVLALLGAAHESAAMAETLQHVPSDHTNETSNSTVKPPTSVASDSSNTTVTTMKPTAASNTTTPGMVSTNMTSTTLKSTPKTTSVSQNTSQISTSTMTVTHNSSVTSAASSVTITTTMHSEAKKGSKFDTGSFVGGIVLTLGVLSILYIGCKMYYSRRGIRYRTIDEHDAII

SEQ ID NO: 37216 - protein, 208 aa, Homo sapiens
  REGION 1..208: note = ENSP00000381204
MGLGARGAWAALLLGTLQVLALLGAAHESAAMAASANIENSGLPHNSSANSTETLQHVPSDHTNETSNSTVKPPTSVASDSSNTTVTTMKPTAASNTTTPGMVSTNMTSTTLKSTPKTTSVSQNTSQISTSTMTVTHNSSVTSAASSVTITTTMHSEAKKGSKFDTGSFVGGIVLTLGVLSILYIGCKMYYSRRGIRYRTIDEHDAII

SEQ ID NO: 37217 - protein, 120 aa, Homo sapiens
  REGION 1..120: note = ENSP00000435331
MKPTAASNTTTPGMVSTNMTSTTLKSTPKTTSVSQNTSQISTSTMTVTHNSSVTSAASSVTITTTMHSEAKKGSKFDTGSFVGGIVLTLGVLSILYIGCKMYYSRRGIRYRTIDEHDAII

SEQ ID NO: 37218 - protein, 120 aa, Homo sapiens; identical to SEQ ID NO: 37217
  REGION 1..120: note = ENSP00000434976

SEQ ID NO: 37219 - protein, 22 aa, Homo sapiens
  REGION 1..22: note = ENSP00000433695
MKPTAASNTTTPGMVSTNMTST

SEQ ID NO: 37220 - protein, 46 aa, Homo sapiens
  REGION 1..46: note = ENSP00000435842
MSSISVVNHQETLQHVPSDHTNETSNSTVKPPTSVASDSSNTTVTT

SEQ ID NO: 37221 - protein, 219 aa, Homo sapiens
  REGION 1..219: note = ENSP00000429775
MSEQEAQAPGGRGLPPDMLAEQVELWWSQQPRRSALCFVVAVGLVAGCGAGGVALLSTTSSRSGEWRLATGTVLCLLALLVLVKQLMSSAVQDMNCIRQAHHVALLRSGGGADALVVLLSGLVLLVTGLTLAGLAAAPAPARPLAAMLSVGIALAALGSLLLLGLLLYQVGVSGHCPSICMATPSTHSGHGGHGSIFSISGQLSAGRRHETTSSIASLI

SEQ ID NO: 37222 - protein, 219 aa, Homo sapiens; identical to SEQ ID NO: 37221
  REGION 1..219: note = ENSP00000429275

SEQ ID NO: 37223 - protein, 15 aa, Homo sapiens
  REGION 1..15: note = ENSP00000428627
MSEQEAQAPGGRGLP

SEQ ID NO: 37224 - protein, 435 aa, Homo sapiens
  REGION 1..435: note = ENSP00000413163
MAQAVWSRLGRILWLACLLPWAPAGVAAGLYELNLTTDSPATTGAVVTISASLVAKDNGSLALPADAHLYRFHWIHTPLVLTGKMEKGLSSTIRVVGHVPGEFPVSVWVTAADCWMCQPVARGFVVLPITEFLVGDLVVTQNTSLPWPSSYLTKTVLKVSFLLHDPSNFLKTALFLYSWDFGDGTQMVTEDSVVYYNYSIIGTFTVKLKVVAEWEEVEPDATRAVKQKTGDFSASLKLQETLRGIQVLGPTLIQTFQKMTVTLNFLGSPPLTVCWRLKPECLPLEEGECHPVSVASTAYNLTHTFRDPGDYCFSIRAENIISKTHQYHKIQVWPSRIQPAVFAFPCATLITVMLAFIMYMTLRNATQQKDMVEVADFDFSPMSDKNPEPPSGVRCCCQMCCGPFLLETPSEYLEIVRENHGLLPPLYKSVKTYTV

SEQ ID NO: 37225 - protein, 423 aa, Homo sapiens
  REGION 1..423: note = ENSP00000341256
MAQAVWSRLGRILWLACLLPWAPAGVAAGLYELNLTTDSPATTGAVVTISASLVAKDNGSLALPADAHLYRFHWIHTPLVLTGKMEKGLSSTIRVVGHVPGEFPVSVWVTAADCWMCQPVARGFVVLPITEFLVGDLVVTQNTSLPWPSSYLTKTVLKVSFLLHDPSNFLKTALFLYSWDFGDGTQMVTEDSVVYYNYSIIGTFTVKLKVVAEWEEVEPDATRAVKQKTGDFSASLKLQETLRGIQVLGPTLIQTFQKMTVTLNFLGSPPLTVCWRLKPECLPLEEGECHPVSVASTAYNLTHTFRDPGDYCFSIRAENIISKTHQYHKIQVWPSRIQPAVFAFPCATLITVMLAFIMYMTLRNATQQKDMVENPEPPSGVRCCCQMCCGPFLLETPSEYLEIVRENHGLLPPLYKSVKTYTV

SEQ ID NO: 37226 - protein, 339 aa, Homo sapiens
  REGION 1..339: note = ENSP00000390200
MEKGLSSTIRVVGHVPGEFPVSVWVTAADCWMCQPVARGFVVLPITEFLVGDLVVTQNTSLPWPSSYLTKTVLKVSFLLHDPSNFLKTALFLYSWDFGDGTQMVTEDSVVYYNYSIIGTFTVKLKVVAEWEEVEPDATRAVKQKTGDFSASLKLQETLRGIQVLGPTLIQTFQKMTVTLNFLGSPPLTVCWRLKPECLPLEEGECHPVSVASTAYNLTHTFRDPGDYCFSIRAENIISKTHQYHKIQVWPSRIQPAVFAFPCATLITVMLAFIMYMTLRNATQQKDMVENPEPPSGVRCCCQMCCGPFLLETPSEYLEIVRENHGLLPPLYKSVKTYTV

SEQ ID NO: 37227 - protein, 321 aa, Homo sapiens
  REGION 1..321: note = ENSP00000330262
MAQAVWSRLGRILWLACLLPWAPAGVAAEFLVGDLVVTQNTSLPWPSSYLTKTVLKVSFLLHDPSNFLKTALFLYSWDFGDGTQMVTEDSVVYYNYSIIGTFTVKLKVVAEWEEVEPDATRAVKQKTGDFSASLKLQETLRGIQVLGPTLIQTFQKMTVTLNFLGSPPLTVCWRLKPECLPLEEGECHPVSVASTAYNLTHTFRDPGDYCFSIRAENIISKTHQYHKIQVWPSRIQPAVFAFPCATLITVMLAFIMYMTLRNATQQKDMVENPEPPSGVRCCCQMCCGPFLLETPSEYLEIVRENHGLLPPLYKSVKTYTV

SEQ ID NO: 37228 - protein, 46 aa, Homo sapiens
  REGION 1..46: note = ENSP00000389379
MEKGLSSTIRVVGHVPGEFPVSVWVTAADCWMCQPVARGFVVLPIT

SEQ ID NO: 37229 - protein, 1078 aa, Homo sapiens
  REGION 1..1078: note = ENSP00000299308
MFGAASRMDTTAVCTGGVTESRGIVDSLQKFSSLPAYLPTNLHISNAEESFFLKEANQDLTRNSSLQARVEPFFIYRARTPPIINASYGPFSVEKIIPQELLLTSTAFGNMDKFPFNWKLKSHILDSSIYSNRPKVQTLFYVTGMGWDDSDLTEDLPCVKMFAFPEAREVAASCRLQGAPGLCVAELELLPEWFSSGLDLEPEEEIPALLGGTTMELFFTLYPADKAGQCPLEEEGKWENNIHSGLESPQQAFPARERIGSVVVYPTQDDLKWSLVSLDENVVISVPLNLVREGDTATFLVSLTSSSVADQFTLRIKAAAGVKITAVRVSSEDQWAVQEEIDNGSTQTSATLTCMGHRPDTQSRVNGSFYEILQVDFGIDNSSDLAGAQQITWQVEYPIEDSMSELVVSEIFVSQTTFVGIVPLAMDTEVLNTAILTGKPVSVPVKVVGVQEDGSVVDVSESVECKSADEDVIKVSNNCDSIFVNGKEMKSKVDTIVNFTHQHFTSQFEVTVWAPRLPLQIEISDTELSQIKGWRIPVAANRRPTRESDDEDDEEKKGRGCSLQYQHATVRVLTQFVAESPDLGQLTYMLGPDWQFDITDLVTEFMKVEEPKIAQLQDGRTLAGREPGITTVQVLSPLSDSILAEKTVIVLDDRVTIAELGVQLVAGMSLSLQPHRADKRAIVSTAAALDVLQSPQQEAIVSSWILFSDGSVTPLDIYDPKDYSVTVSSLDEMVVSVQANLESKWPIVVAEGEGQGPLIKLEMMISEPCQKTKRKSVLAVGKGNVKVKFEPSSDEHQGGSNDIEGINREYKDHLSNSIEREGNQERAVQEWFHRGTPVGQEESTNKSTTPQSPMEGKNKLLKSGGPDAFTSFPTQGKSPDPNNPSDLTVTSRGLTDLEIGMYALLCVFCLAILVFLINCVAFAWKYRHKRFAVSEQGNIPHSHDWVWLGNEVELLENPVDITLPSEECTTMIDRGLQFEERNFLLNGSSQKTFHSQLLRPSDYVYEKEIKNEPMNSSGPKRKRVKFTSYTTILPEDGGPYTNSILFDSDDNIKWVCQDMGLGDSQDFRDYMESLQDQM

SEQ ID NO: 37230 - protein, 590 aa, Homo sapiens
  REGION 1..590: note = ENSP00000482788
MKSKVDTIVNFTHQHFTSQFEVTVWAPRLPLQIEISDTELSQIKGWRIPVAANRRPTRESDDEDDEEKKGRGCSLQYQHATVRVLTQFVAESPDLGQLTYMLGPDWQFDITDLVTEFMKVEEPKIAQLQDGRTLAGREPGITTVQVLSPLSDSILAEKTVIVLDDRVTIAELGVQLVAGMSLSLQPHRADKRAIVSTAAALDVLQSPQQEAIVSSWILFSDGSVTPLDIYDPKDYSVTVSSLDEMVVSVQANLESKWPIVVAEGEGQGPLIKLEMMISEPCQKTKRKSVLAVGKGNVKVKFEPSSDEHQGGSNDIEGINREYKDHLSNSIEREGNQERAVQEWFHRGTPVGQEESTNKSTTPQSPMEGKNKLLKSGGPDAFTSFPTQGKSPDPNNPSDLTVTSRGLTDLEIGMYALLCVFCLAILVFLINCVAFAWKYRHKRFAVSEQGNIPHSHDWVWLGNEVELLENPVDITLPSEECTTMIDRGLQFEERNFLLNGSSQKTFHSQLLRPSDYVYEKEIKNEPMNSSGPKRKRVKFTSYTTILPEDGGPYTNSILFDSDDNIKWVCQDMGLGDSQDFRDYMESLQDQM

SEQ ID NO: 37231 - protein, 1108 aa, Homo sapiens
  REGION 1..1108: note = ENSP00000410852
MRSEGAAPGPAAPLCGALSLLLGALLGKVIEGHGVTDNIQRFSSLPPYLPVSYHILRAETSFFLKEANQDLLRNSSLQARVESFFTYKTRQPPVLNASYGPFSVEKVVPLDLMLTSNFLGPTNKFSFDWKLKAHILRDKVYLSRPKVQVLFHIMGRDWDDHGAGEKLPCLRVFAFRETREVRGSCRLKGDLGLCVAELELLSSWFSAPTVGAGRKKSMDQPEGTPVELYYTVHPGNERGDCAGGDFRKGNAIRPGKDGLEETTSHLQRIGTVGLYRAQDSAQLSELRLDGNVVIWLPSRPVKQGEVVTAYVTISSNSSVDLFILRAKVKKGVNILSAQTREPRQWGVKQEVGSGGKHVTATVACQRLGPSPRNRSSSLFNEVVQMNFEIASFSSLSGTQPITWQVEYPRKGTTDIAVSEIFVSQKDLVGIVPLAMDTEILNTAVLTGKTVAMPIKVVSVEENSAVMDISESVECKSTDEDVIKVSERCDYIFVNGKEIKGKMDAVVNFTYQYLSAPLCVTVWVPRLPLQIEVSDTELSQIKGWRVPIVTNKRPTRESEDEDEEERRGRGCALQYQHATVRVLTQFVSEGAGPWGQPNYLLSPNWQFDITHLVADFMKLEEPHVATLQDSRVLVGREVGMTTIQVLSPLSDSILAEKTITVLDDKVSVTDLAIQLVAGLSVALYPNAENSKAVTAVVTAEEVLRTPKQEAVFSTWLQFSDGSVTPLDIYDTKDFSLAATSQDEAVVSVPQPRSPRWPVVVAEGEGQGPLIRVDMTIAEACQKSKRKSILAVGVGNVRVKFGQNDADSSPGGDYEEDEIKNHASDRRQKGQHHERTGQDGHLYGSSPVEREEGALRRATTTARSLLDNKVVKNSRADGGRLAGEGQLQNIPIDFTNFPAHVDLPKAGSGLEENDLVQTPRGLSDLEIGMYALLGVFCLAILVFLINCATFALKYRHKQVPLEGQASMTHSHDWVWLGNEAELLESMGDAPPPQDEHTTIIDRGPGACEESNHLLLNGGSHKHVQSQIHRSADSGGRQGREQKQDPLHSPTSKRKKVKFTTFTTIPPDDSCPTVNSIVSSNDEDIKWVCQDVAVGAPKELRNYLEKLKDKA

SEQ ID NO: 37232 - protein, 637 aa, Homo sapiens
  REGION 1..637: note = ENSP00000374092
MQRDESSPFPPLFSLTSSQVSDRCDYVFVNGKEMKGKVNVVVNFTYQHLSSPLEMTVWVPRLPLQIEVSDTELNQIKGWRVPIVSSRRPAGDSEEEEDDERRGRGCTLQYQHAMVRVLTQFVAEAAGPGGHLAHLLGSDWQVDITELINDFMQVEEPRIAKLQGGQILMGQELGMTTIQILSPLSDTILAEKTITVLDEKVTITDLGVQLVTGLSLSLQLSPGSNRAIFATAVAQELLQRPKQEAAISCWVQFSDGSVTPLDIYDGKDFSLMATSLDEKVVSIHQDPKFKWPIIAAETEGQGTLVKVEMVISESCQKSKRKSVLAVGTANIKVKFGQNDANPNTSDSRHTGAGVHMENNVSDRRPKKPSQEWGSQEGQYYGSSSMGLMEGRGTTTDRSILQKKKGQESLLDDNSHLQTIPSDLTSFPAQVDLPRSNGEMDGNDLMQASKGLSDLEIGMYALLGVFCLAILVFLINCVTFALKYRHKQVPFEEQEGMSHSHDWVGLSNRTELLENHINFASSQDEQITAIDRGMDFEESKYLLSTNSQKSINGQLFKPLGPIIIDGKDQKSEPPTSPTSKRKRVKFTTFTAVSSDDEYPTRNSIVMSSEDDIKWVCQDLDPGDCKELHNYMERLHENV

SEQ ID NO: 37233 - protein, 1099 aa, Homo sapiens
  REGION 1..1099: note = ENSP00000408581
MCPSEMGTLWHHWSPVLISLAALFSKVTEGRGILESIQRFSLLPTYLPVTYHINNADVSFFLKEANQDIMRNSSLQSRVESFLIYKSRRLPVLNASYGPFSIEQVVPQDLMLPSNPFGFTNKFSLNWKLKAHILRDKVYLSRPKVQVLFHIMGRDWDDRSAGEKLPCLRVFAFRETREVRGSCRLQGDLGLCVAELELLSSWFSPPTVVAGRRKSVDQPEGTPVELYYTVHPGGERGDCVREDARRSNGIRTGHSDIDESGPPLQRIGSIFLYQTHRKPSLRELRLDNSVAIHYIPKTVRKGDVLTFPVSISRNSTEDRFTLRAKVKKGVNIIGVRASSPSIWDVKERTDYTGKYAPAVIVCQKKAAGSENSADGASYEVMQIDVEVEEPGDLPATQLVTWQVEYPGEITSDLGVSKIYVSPKDLIGVVPLAMEAEILNTAILTGKTVAVPVKVVSVEDDGTVTELLESVECRSSDEDVIKVSDRCDYVFVNGKEMKGKVNVVVNFTYQHLSSPLEMTVWVPRLPLQIEVSDTELNQIKGWRVPIVSSRRPAGDSEEEEDDERRGRGCTLQYQHAMVRVLTQFVAEAAGPGGHLAHLLGSDWQVDITELINDFMQVEEPRIAKLQGGQILMGQELGMTTIQILSPLSDTILAEKTITVLDEKVTITDLGVQLVTGLSLSLQLSPGSNRAIFATAVAQELLQRPKQEAAISCWVQFSDGSVTPLDIYDGKDFSLMATSLDEKVVSIHQDPKFKWPIIAAETEGQGTLVKVEMVISESCQKSKRKSVLAVGTANIKVKFGQNDANPNTSDSRHTGAGVHMENNVSDRRPKKPSQEWGSQEGQYYGSSSMGLMEGRGTTTDRSILQKKKGQESLLDDNSHLQTIPSDLTSFPAQVDLPRSNGEMDGNDLMQASKGLSDLEIGMYALLGVFCLAILVFLINCVTFALKYRHKQVPFEEQEGMSHSHDWVGLSNRTELLENHINFASSQDEQITAIDRGMDFEESKYLLSTNSQKSINGQLFKPLGPIIIDGKDQKSEPPTSPTSKRKRVKFTTFTAVSSDDEYPTRNSIVMSSEDDIKWVCQDLDPGDCKELHNYMERLHENV

SEQ ID NO: 37234 - protein, 984 aa, Homo sapiens
  REGION 1..984: note = ENSP00000316532
MAPGMSGRGGAALLCLSALLAHASGRSHPASPSPPGPQASPVLPVSYRLSHTRLAFFLREARPPSPAVANSSLQRSEPFVVFQTKELPVLNVSLGPFSTSQVVARELLQPSSTLDIPERLTVNWKVRAFIVRSHVPASQPVVQVLFYVAGRDWDDFGVTERLPCVRLHAFRDAREHPLLRIGSISLFRPPPRRTLQEHRLDSNLMIRLPDRPLKPGEVLSILLYLAPNSSSPSSPSVEHFTLRVKAKKGVTLLGTKSRSGQWHVTSELLTGAKHSTATVDVAWAQSTPLPPREGQGPLEILQLDFEMENFTSQSVKRRIMWHIDYRGHGALPDLERAVTELTVIQRDVQAILPLAMDTEIINTAILTGRTVAIPVKVIAIEVNGLVLDISALVECESDNEDIIKVSSSCDYVFVSGKESRGSMNARVTFRYDVLNAPLEMTVWVPKLPLHIELSDARLSQVKGWRVPILPDRRSVRESEDEDEEEEERRQSASRGCTLQYQHATLQVFTQFHTTSSEGTDQVVTMLGPDWLVEVTDLVSDFMRVGDPRVAHMVDSSTLAGLEPGTTPFKVVSPLTEAVLGETLLTVTEEKVSITQLQAQVVASLALSLRPSPGSSHTILATTAAQQTLSFLKQEALLSLWLSYSDGTTAPLSLYSPRDYGLLVSSLDEHVATVTQDRAFPLVVAEAEGSGELLRAELTIAESCQKTKRKSVLATTPVGLRVHFGRDEEDPTYDYPGPSQPGPGGGEDEARGAGPPGSALPAPEAPGPGTASPVVPPTEDFLPLPTGFLQVPRGLTDLEIGMYALLGVFCLAILVFLINCIVFVLRYRHKRIPPEGQTSMDHSHHWVFLGNGQPLRVQGELSPPAGNPLETVPAFCHGDHHSSGSSQTSVQSQVHGRGDGSSGGSARDQAEDPASSPTSKRKRVKFTTFTTLPSEELAYDSVPAGEEDEEEEEDLGWGCPDVAGPTRPTAPPDLHNYMRRIKEIA

SEQ ID NO: 37235 - protein, 1074 aa, Homo sapiens
  REGION 1..1074: note = ENSP00000487800
MAPGMSGRGGAALLCLSALLAHASGRSHPASPSPPGPQASPVLPVSYRLSHTRLAFFLREARPPSPAVANSSLQRSEPFVVFQTKELPVLNVSLGPFSTSQVVARELLQPSSTLDIPERLTVNWKVRAFIVRSHVPASQPVVQVLFYVAGRDWDDFGVTERLPCVRLHAFRDAREVKSSCRLSGGLATCLVRAELPLAWFGPPAPAAPPTARRKSPDGLEPEATGESQQAELYYTLHAPDASGGCGGSRRGAGPGVGARAESPTQHPLLRIGSISLFRPPPRRTLQEHRLDSNLMIRLPDRPLKPGEVLSILLYLAPNSSSPSSPSVEHFTLRVKAKKGVTLLGTKSRSGQWHVTSELLTGAKHSTATVDVAWAQSTPLPPREGQGPLEILQLDFEMENFTSQSVKRRIMWHIDYRGHGALPDLERAVTELTVIQRDVQAILPLAMDTEIINTAILTGRTVAIPVKVIAIEVNGLVLDISALVECESDNEDIIKVSSSCDYVFVSGKESRGSMNARVTFRYDVLNAPLEMTVWVPKLPLHIELSDARLSQVKGWRVPILPDRRSVRESEDEDEEEEERRQSASRGCTLQYQHATLQVFTQFHTTSSEGTDQVVTMLGPDWLVEVTDLVSDFMRVGDPRVAHMVDSSTLAGLEPGTTPFKVVSPLTEAVLGETLLTVTEEKVSITQLQAQVVASLALSLRPSPGSSHTILATTAAQQTLSFLKQEALLSLWLSYSDGTTAPLSLYSPRDYGLLVSSLDEHVATVTQDRAFPLVVAEAEGSGELLRAELTIAESCQKTKRKSVLATTPVGLRVHFGRDEEDPTYDYPGPSQPGPGGGEDEARGAGPPGSALPAPEAPGPGTASPVVPPTEDFLPLPTGFLQVPRGLTDLEIGMYALLGVFCLAILVFLINCIVFVLRYRHKRIPPEGQTSMDHSHHWVFLGNGQPLRVQGELSPPAGNPLETVPAFCHGDHHSSGSSQTSVQSQVHGRGDGSSGGSARDQAEDPASSPTSKRKRVKFTTFTTLPSEELAYDSVPAGEEDEEEEEDLGWGCPDVAGPTRPTAPPDLHNYMRRIKEIA

SEQ ID NO: 37236 - protein, 77 aa, Homo sapiens
  REGION 1..77: note = ENSP00000425266
MSNNGADLTFGYISCFVAILLFGSNFVPLKKFDTGDGMFLQWVLCAAIWLVALVVNLILHCPKFWPFAMLGGCIWAT

SEQ ID NO: 37237 - protein, 87 aa, Homo sapiens
  REGION 1..87: note = ENSP00000421289
MSNNGADLTFGYISCFVAILLFGSNFVPLKKFDTGDGMFLQWVLCAAIWLVALVVNLILHCPKFWPFAMLGGCIWATGNIAVVPIIK

SEQ ID NO: 37238 - protein, 10 aa, Homo sapiens
  REGION 1..10: note = ENSP00000422255
MSNNGADLTF

SEQ ID NO: 37239 - protein, 167 aa, Homo sapiens
  REGION 1..167: note = ENSP00000422297
MSNNGADLTFGYISCFVAILLFGSNFVPLKKFDTGDGMFLQWVLCAAIWLVALVVNLILHCPKFWPFAMLGGCIWATGNIAVVPIIKTIGLGLGILIWGSFNALTGWASSRFGWFGLDAEEVSNPLLNYIGAGLSVVSAFIFLFIKSEIPNNTCSMDTTPLITEHVI

SEQ ID NO: 37240 - protein, 345 aa, Homo sapiens
  REGION 1..345: note = ENSP00000296529
MSNNGADLTFGYISCFVAILLFGSNFVPLKKFDTGDGMFLQWVLCAAIWLVALVVNLILHCPKFWPFAMLGGCIWATGNIAVVPIIKTIGLGLGILIWGSFNALTGWASSRFGWFGLDAEEVSNPLLNYIGAGLSVVSAFIFLFIKSEIPNNTCSMDTTPLITEHVINTTQDPCSWVDKLSTVHHRIVGCSLAVISGVLYGSTFVPIIYIKDHSKRNDSIYAGASQYDLDYVFAHFSGIFLTSTVYFLAYCIAMKNSPKLYPEAVLPGFLSGVLWAIATCCWFIANHSLSAVVSFPIITAGPGFIAAMWGIFMFKEIKGLQNYLLMILAFCIILTGALCTAFSKI

SEQ ID NO: 37241 - protein, 87 aa, Homo sapiens; identical to SEQ ID NO: 37237
  REGION 1..87: note = ENSP00000424659

SEQ ID NO: 37242 - protein, 137 aa, Homo sapiens
  REGION 1..137: note = ENSP00000422082
MSNNGADLTFGYISCFVAILLFGSNFVPLKKFDTGDGMFLQWVLCAAIWLVALVVNLILHCPKFWPFAMLGGCIWATGNIAVVPIIKTIGLGLGILIWGSFNALTGWASSRFGWFGLDAEEVSNPLLNYIGAGLSVV

SEQ ID NO: 37243 - protein, 73 aa, Homo sapiens
  REGION 1..73: note = ENSP00000425815
MSNNGADLTFGYISCFVAILLFGSNFVPLKKFDTGDGNYFSLIVNVILFLKMKFLFWSFKSIATKINHVDLDT

SEQ ID NO: 37244 - protein, 169 aa, Homo sapiens
  REGION 1..169: note = ENSP00000426211
MSNNGADLTFGYISCFVAILLFGSNFVPLKKFDTGDGMFLQWVLCAAIWLVALVVNLILHCPKFWPFAMLGGCIWATGNIAVVPIIKTIGLGLGILIWGSFNALTGWASSRFGWFGLDAEEVSNPLLNYIGAGLSVVSAFIFLFIKSEIPNNTCSMDTTPLITEHVSIV

SEQ ID NO: 37245 - protein, 110 aa, Homo sapiens
  REGION 1..110: note = ENSP00000420990
MSNNGADLTFGYISCFVAILLFGSNFVPLKKFDTGDGMFLQWVLCAAIWLVALVVNLILHCPKFWPFAMLGGCIWATGNIAVVPIIKTIGLGLGILIWGSFNALTGWASS

SEQ ID NO: 37246 - protein, 194 aa, Homo sapiens
  REGION 1..194: note = ENSP00000420930
MSNNGADLTFGYISCFVAILLFGSNFVPLKKFDTGDGMFLQWVLCAAIWLVALVVNLILHCPKFWPFAMLGGCIWATGNIAVVPIIKTIGLGLGILIWGSFNALTGWASSRFGWFGLDAEEVSNPLLNYIGAGLSVVSAFIFLFIKSEIPNNTCSMDTTPLITEHGLQSCSDIWSTLWIYICANHLHQGPQQKK

SEQ ID NO: 37247 - protein, 77 aa, Homo sapiens; identical to SEQ ID NO: 37236
  REGION 1..77: note = ENSP00000425907

SEQ ID NO: 37248 - protein, 91 aa, Homo sapiens
  REGION 1..91: note = ENSP00000422899
MSNNGADLTFGYISCFVAILLFGSNFVPLKKFDTGDGMFLQWVLCAAIWLVALVVNLILHCPKFWPFAMLGGCIWATGNIAVVPIIKTIGL

SEQ ID NO: 37249 - protein, 249 aa, Homo sapiens
  REGION 1..249: note = ENSP00000420919
MDGKKCSVWMFLPLVFTLFTSAGLWIVYFIAVEDDKILPLNSAERKPGVKHAPYISIAGDDPPASCVFSQVMNMAAFLALVVAVLRFIQLKPKVLNPWLNISGLVALCLASFGMTLLGNFQLTNDEEIHNVGTSLTFGFGTLTCWIQAALTLKVNIKNEGRRVGIPRVILSASITLCVVLYFILMAQSIHMYAARVQWGLVMCFLSYFGTFAVEFRHYRYEIVCSEYQENFLSFSESLSEASEYQTDQV

SEQ ID NO: 37250 - protein, 249 aa, Homo sapiens; identical to SEQ ID NO: 37249
  REGION 1..249: note = ENSP00000403438

SEQ ID NO: 37251 - protein, 120 aa, Homo sapiens
  REGION 1..120: note = ENSP00000421812
MDGKKCSVWMFLPLVFTLFTSAGLWIVYFIAVEDDKILPLNSAERKPGVKHAPYISIAGDDPPASCVFSQVMNMAAFLALVVAVLRFIQLKPKVLNPWLNISGLVALCLASFGMTLLAHK

SEQ ID NO: 37252 - protein, 67 aa, Homo sapiens
  REGION 1..67: note = ENSP00000414988
MDGKKCSVWMFLPLVFTLFTSAGLWIVYFIAVEDDKILPLNSAERKPGVKHAPYISIAGDDPPASCV

SEQ ID NO: 37253 - protein, 289 aa, Homo sapiens
  REGION 1..289: note = ENSP00000281924
MEPAAGIQRRSSQGPTVPPPPRGHAPPAAAPGPAPLSSPVREPPQLEEERQVRISESGQFSDGLEDRGLLESSTRLKPHEAQNYRKKALWVSWFSIIVTLALAVAAFTVSVMRYSASAFGFAFDAILDVLSSAIVLWRYSNAAAVHSAHREYIACVILGVIFLLSSICIVVKAIHDLSTRLLPEVDDFLFSVSILSGILCSILAVLKFMLGKVLTSRALITDGFNSLVGGVMGFSILLSAEVFKHDSAVWYLDGSIGVLIGLTIFAYGVKLLIDMVPRVRQTRHYEMFE

SEQ ID NO: 37254 - protein, 113 aa, Homo sapiens
  REGION 1..113: note = ENSP00000424746
MSQPRTPEQALDTPGDCPPGRRDEDAGEGIQCSQRMLSFSDALLSIIATVMILPVTHTEISPEQFDRSVQRLLATRIAVYLMTFLIVTVAWAAHTRLFQVVGKTDDTLALLNL

SEQ ID NO: 37255 - protein, 504 aa, Homo sapiens
  REGION 1..504: note = ENSP00000264771
MSQPRTPEQALDTPGDCPPGRRDEDAGEGIQCSQRMLSFSDALLSIIATVMILPVTHTEISPEQQFDRSVQRLLATRIAVYLMTFLIVTVAWAAHTRLFQVVGKTDDTLALLNLACMMTITFLPYTFSLMVTFPDVPLGIFLFCVCVIAIGVVQALIVGYAFHFPHLLSPQIQRSAHRALYRRHVLGIVLQGPALCFAAAIFSLFFVPLSYLLMVTVILLPYVSKVTGWCRDRLLGHREPSAHPVEVFSFDLHEPLSKERVEAFSDGVYAIVATLLILDICEDNVPDPKDVKERFSGSLVAALSATGPRFLAYFGSFATVGLLWFAHHSLFLHVRKATRAMGLLNTLSLAFVGGLPLAYQQTSAFARQPRDELERVRVSCTIIFLASIFQLAMWTTALLHQAETLQPSVWFGGREHVLMFAKLALYPCASLLAFASTCLLSRFSVGIFHLMQIAVPCAFLLLRLLVGLALATLRVLRGLARPEHPPPAPTGQDDPQSQLLPAPC

SEQ ID NO: 37256 - protein, 72 aa, Homo sapiens
  REGION 1..72: note = ENSP00000427218
MSQPRTPEQALDTPGDCPPGRRDEDAGEGIQCSQRMLSFSDALLSIIATVMILPVTHTEISPEQWTKAAPWK

SEQ ID NO: 37257 - protein, 179 aa, Homo sapiens
  REGION 1..179: note = ENSP00000425181
MSQPRTPEQALDTPGDCPPGRRDEDAGEGIQCSQRMLSFSDALLSIIATVMQFDRSVQRLLATRIAVYLMTFLIVTVAWAAHTRLFQVVGKTDDTLALLNLACMMTITFLPYTFSLMVTFPDVPLGIFLFCVCVIAIGVVQALIVGYAFHFPHLLSPQIQRSAHRALYRRHVLGIVLQG

SEQ ID NO: 37258 - protein, 212 aa, Homo sapiens
  REGION 1..212: note = ENSP00000425867
MTFLIVTVAWAAHTRLFQVVGKTDDTLALLNLACMMTITFLPYTFSLMVTFPDVPLGIFLFCVCVIAIGVVQALIVGYAFHFPHLLSPQIQRSAHRALYRRHVLGIVLQGPALCFAAAIFSLFFVPLSYLLMVTVILLPYVSKVTGWCRDRLLGHREPSAHPVEVFSFDLHEPLSKERVEAFSDGVYAIVATLLILDICEDNVPDPKDVKER

SEQ ID NO: 37259 - protein, 72 aa, Homo sapiens; identical to SEQ ID NO: 37256
  REGION 1..72: note = ENSP00000423751

SEQ ID NO: 37260 - protein, 162 aa, Homo sapiens
  REGION 1..162: note = ENSP00000421750
MTFLIVTVAWAAHTRLFQVVGKTDDTLALLNLFSLMVTFPDVPLGIFLFCVCVIAIGVVQALIVGYAFHFPHLLSPQIQRSAHRALYRRHVLGIVLQGPALCFAAAIFSLFFVPLSYLLMVTVILLPYVSKVTGWCRDRLLGHREPSAHPVEVFSFDLHEPL

SEQ ID NO: 37261 - protein, 77 aa, Homo sapiens
  REGION 1..77: note = ENSP00000427626
MSQPRTPEQALDTPGDCPPGRRDEDAGEGIQCSQRMLSFSDALLSIIATVMILPVTHTEISPEQLPQQAGPLRSCSE

SEQ ID NO: 37262 - protein, 388 aa, Homo sapiens
  REGION 1..388: note = ENSP00000427039
MMTITFLPYTFSLMVTFPDVPLGIFLFCVCVIAIGVVQALIVGYAFHFPHLLSPQIQRSAHRALYRRHVLGIVLQGPALCFAAAIFSLFFVPLSYLLMVTVILLPYVSKVTGWCRDRLLGHREPSAHPVEVFSFDLHEPLSKERVEAFSDGVYAIVATLLILDICEDNVPDPKDVKERFSGSLVAALSATGPRFLAYFGSFATVGLLWFAHHSLFLHVRKATRAMGLLNTLSLAFVGGLPLAYQQTSAFARQPRDELERVRVSCTIIFLASIFQLAMWTTALLHQAETLQPSVWFGGREHVLMFAKLALYPCASLLAFASTCLLSRFSVGIFHLMQIAVPCAFLLLRLLVGLALATLRVLRGLARPEHPPPAPTGQDDPQSQLLPAPC

SEQ ID NO: 37263 - protein, 422 aa, Homo sapiens
  REGION 1..422: note = ENSP00000423669
MTFLIVTVAWAAHTRLFQVVGKTDDTLALLNLACMMTITFLPYTFSLMVTFPDVPLGIFLFCVCVIAIGVVQALIVGYAFHFPHLLSPQIQRSAHRALYRRHVLGIVLQGPALCFAAAIFSLFFVPLSYLLMVTVILLPYVSKVTGWCRDRLLGHREPSAHPVEVFSFDLHEPLSKERVEAFSDGVYAIVATLLILDICEDNVPDPKDVKERFSGSLVAALSATGPRFLAYFGSFATVGLLWFAHHSLFLHVRKATRAMGLLNTLSLAFVGGLPLAYQQTSAFARQPRDELERVRVSCTIIFLASIFQLAMWTTALLHQAETLQPSVWFGGREHVLMFAKLALYPCASLLAFASTCLLSRFSVGIFHLMQIAVPCAFLLLRLLVGLALATLRVLRGLARPEHPPPAPTGQDDPQSQLLPAPC

SEQ ID NO: 37264 - protein, 284 aa, Homo sapiens
  REGION 1..284: note = ENSP00000424208
MTFLIVTVAWAAHTRLFQVVGKTDDTLALLNLACMMTITFLPYTFSLMVTFPDVPLGIFLFCVCVIAIGVVQALIVGYAFHFPHLLSPQIQRSAHRALYRRHVLGIVLQGPALCFAAAIFSLFFVPLSYLLMVTVILLPYVSKVTGWCRDRLLGHREPSAHPVEVFSFDLHEPLSKERVEAFSDGVYAIVATLLILDICEDNVPDPKDVKERFSGSLVAALSATGPRFLAYFGSFATVGLLWFAHHSLFLHVRKATRAMGLLNTLSLAFVGGLPLAYQQTSAFA

SEQ ID NO: 37265 - protein, 133 aa, Homo sapiens
  REGION 1..133: note = ENSP00000425763
MSQPRTPEQALDTPGDCPPGRRDEDAGEGIQCSQRMLSFSDALLSIIATVMILPVTHTEISPEQQFDRSVQRLLATRIAVYLMTFLIVTVAWAAHTRLFQVVGKTDDTLALLNLACMMTITFLPYTFSLMVTF

SEQ ID NO: 37266 - protein, 388 aa, Homo sapiens; identical to SEQ ID NO: 37262
  REGION 1..388: note = ENSP00000485461

SEQ ID NO: 37267 - protein, 235 aa, Homo sapiens
  REGION 1..235: note = ENSP00000417626
MGTADSDEMAPEAPQHTHIDVHIHQESALAKLLLTCCSALRPRATQARGSSRLLVASWVMQIVLGILSAVLGGFFYIRDYTLLVTSGAAIWTGAVAVLAGAAAFIYEKRGGTYWALLRTLLTLAAFSTAIAALKLWNEDFRYGYSYYNSACRISSSSDWNTPAPTQSPEEVRRLHLCTSFMDMLKALFRTLQAMLLGVWILLLLASLTPLWLYCWRMFPTKGKRDQKEMLEVSGI

SEQ ID NO: 37268 - protein, 235 aa, Homo sapiens; identical to SEQ ID NO: 37267
  REGION 1..235: note = ENSP00000004103

SEQ ID NO: 37269 - protein, 176 aa, Homo sapiens
  REGION 1..176: note = ENSP00000420818
MQIVLGILSAVLGGFFYIRDYTLLVTSGAAIWTGAVAVLAGAAAFIYEKRGGTYWALLRTLLTLAAFSTAIAALKLWNEDFRYGYSYYNSACRISSSSDWNTPAPTQSPEEVRRLHLCTSFMDMLKALFRTLQAMLLGVWILLLLASLTPLWLYCWRMFPTKGKRDQKEMLEVSGI

SEQ ID NO: 37270 - protein, 177 aa, Homo sapiens
  REGION 1..177: note = ENSP00000417834
GSSRLLVASWVMQIVLGILSAVLGGFFYIRDYTLLVTSGAAIWTGAVAVLAGAAAFIYEKRGGTYWALLRTLLTLAAFSTAIAALKLWNEDFRYGYSYYNSACRISSSSDWNTPAPTQSPEEVRRLHLCTSFMDMLKALFRTLQAMLLGVWILLLLASLTPLWLYCWRMFPTKGVSP

SEQ ID NO: 37271 - protein, 118 aa, Homo sapiens
  REGION 1..118: note = ENSP00000420081
MQIVLGILSAVLGGFFYIRDYTLLVTSGAAIWTGAVAVLAGAAAFIYEKRGGTYWALLRTLLTLAAFSTAIAALKLWNEDFRYGYSYYNSACRISSSSDWNTPAPTQSPEEVRRLHLC

SEQ ID NO: 37272 - protein, 270 aa, Homo sapiens
  REGION 1..270: note = ENSP00000419258
MTQNTVIVNGVAMASRPSQPTHVNVHIHQESALTQLLKAGGSLKKFLFHPGDTVPSTARIGYEQLALGVTQILLGVVSCVLGVCLSLGPWTVLSASGCAFWAGSVVIAAGAGAIVHEKHPGKLAGYISSLLTLAGFATAMAAVVLCVNSFIWQTEPFLYIDTVCDRSDPVFPTTGYRWMRRSQENQWQKEECRAYMQMLRKLFTAIRALFLAVCVLKVIVSLVSLGVGLRNLCGQSSQPLNEEGSEKRLLGENSVPPSPSREQTSTAIVL

SEQ ID NO: 37273 - protein, 270 aa, Homo sapiens; identical to SEQ ID NO: 37272
  REGION 1..270: note = ENSP00000318409

SEQ ID NO: 37274 - protein, 270 aa, Homo sapiens; identical to SEQ ID NO: 37272
  REGION 1..270: note = ENSP00000410269

SEQ ID NO: 37275 - protein, 270 aa, Homo sapiens; identical to SEQ ID NO: 37272
  REGION 1..270: note = ENSP00000397810

SEQ ID NO: 37276 - protein, 233 aa, Homo sapiens
  REGION 1..233: note = ENSP00000404831
MTQNTVIVNGVAMASRPSQPTHVNVHIHQESALTQLLKAGGSLKKFLFHPGDTVPSTARIGYEQLALGVIAAGAGAIVHEKHPGKLAGYISSLLTLAGFATAMAAVVLCVNSFIWQTEPFLYIDTVCDRSDPVFPTTGYRWMRRSQENQWQKEECRAYMQMLRKLFTAIRALFLAVCVLKVIVSLVSLGVGLRNLCGQSSQPLNEEGSEKRLLGENSVPPSPSREQTSTAIVL

SEQ ID NO: 37277 - protein, 270 aa, Homo sapiens; identical to SEQ ID NO: 37272
  REGION 1..270: note = ENSP00000413531

SEQ ID NO: 37278 - protein, 297 aa, Homo sapiens
  REGION 1..297: note = ENSP00000281961
MEPRALVTALSLGLSLCSLGLLVTAIFTDHWYETDPRRHKESCERSRAGADPPDQKNRLMPLSHLPLRDSPPLGRRLLPGGPGRADPESWRSLLGLGGLDAECGRPLFATYSGLWRKCYFLGIDRDIDTLILKGIAQRCTAIKYHFSQPIRLRNIPFNLTKTIQQDEWHLLHLRRITAGFLGMAVAVLLCGCIVATVSFFWEESLTQHVAGLLFLMTGIFCTISLCTYAASISYDLNRLPKLIYSLPADVEHGYSWSIFCAWCSLGFIVAAGGLCIAYPFISRTKIAQLKSGRDSTV

SEQ ID NO: 37279 - protein, 111 aa, Homo sapiens
  REGION 1..111: note = ENSP00000477622
MEPRALVTALSLGLSLCSLGLLVTAIFTDHWYETDPRRHKESCERSRAGADPPDQKNRLMPLSHLLGPLEEVLLPGHRPGHRHPHPERYCAAMHGHQVPLFSAHPLAKHSF

SEQ ID NO: 37280 - protein, 294 aa, Homo sapiens
  REGION 1..294: note = ENSP00000456594
MAAGRLLLYTGLSLALCALGMLAVAICSDHWYETDARKHRDRCKAFNTRRVDPGFIYNNNNNLPLRASRSRLDRWEGKLLRARNRRQLFAMSPADECSRQYNSTNMGLWRKCHRQGFDPEIAALIRKGEIERCTYIKYHYSSATIPRNLTFNITKTIRQDEWHALHLRRMTAGFMGMAVAIILFGWIIGVLGCCWDRGLMQYVAGLLFLMGGTFCIISLCTCVAGINFELSRYPRYLYGLPDDISHGYGWSMFCAWGGLGLTLISGFFCTLAPSVQPVPRTNYPKSRPENGTVC

SEQ ID NO: 37281 - protein, 292 aa, Homo sapiens
  REGION 1..292: note = ENSP00000484025
MAAGRLLLYTGLSLALCALGMLAVAICSDHWYETDARKHRDRCKAFNTRRVDPGFIYNNNNNLPLRASRSRLDRWEGKLLRARNRRQLFAMSPADECSRQYNSTNMGLWRKCHRQGFDPEIAALIRKGEIERCTYIKYHYSSATIPRNLTFNVTKTLRCMYCMYLRRMTAGFMGMAVAIILFGWIIGVLGCCWDRGLMQYVAGLLFLMGGTFCIISLCTCVAGINFELSRYPRYLYGLPDDISHGYGWSMFCAWGGLGLTLISGFFCTLAPSVQPVPRTNYPKSRPENGTVC

SEQ ID NO: 37282 - protein, 190 aa, Homo sapiens
  REGION 1..190: note = ENSP00000397763
MALNNFLFAQCACYFLAFLFSFVVVVPLSENGHDFRGRCLLFTEGMWLSANLTVQERERFTVQEWGPPAACRFSLLASLLSLLLAAAHAWRTLFFLCKGHEGSFFSAFLNLLVSAFVVFLVFIASTIVSVGFTMWCDTITEKGTVPHSCEELQDIDLELGVDNSAFYDQFAIAQGSLIDSHGVETPPGQS

SEQ ID NO: 37283 - protein, 78 aa, Homo sapiens
  REGION 1..78: note = ENSP00000452113
  VARIANT 1: note = Any amino acid
XPDPREGAAAGPAVPTHLLPRGEERCHLGTVQAGGAGPDLPAALGGTGLPGEAAGGLCLGPGHMQPCVCPLDATCSEP

SEQ ID NO: 37284 - protein, 233 aa, Homo sapiens
  REGION 1..233: note = ENSP00000450958
MALNNFLFAQCACYFLAFLFSFVVVVPLSENGHDFRGRCLLFTEGMWLSANLTVQERERFTVQEWGPPAACRFSLLASLLSLLLAAAHAWRTLFFLCKGHEGSFFSAFLNLLVSAFVVFLVFIASTIVSVGFTMWCDTITEKGTVPHSCEELQDIDLELGVDNSAFYDQFAIAQFGLWASWLAWLAITTLAFLKVYHNYRQEDLLDSLIHEKELLLARPSPRTSFQEEKSAVI

SEQ ID NO: 37285 - protein, 197 aa, Homo sapiens
  REGION 1..197: note = ENSP00000340477
MALNNFLFAQCACYFLAFLFSFVVVVPLSENGHDFRGRCLLFTEGMWLSANLTVQERERFTVQEWGPPAACRFSLLASLLSLLLAAAHAWRTLFFLCKGHEGSFFSAFLNLLVSAFVVFLVFIASTIVSVGFTMWCDTITEKGTVPHSCEELQDIDLELGVDNSAFYDQFAIAQVGGSGQEGRLAMLGGGHLLLDIC

SEQ ID NO: 37286 - protein, 211 aa, Homo sapiens
  REGION 1..211: note = ENSP00000483627
MALNNFLFAQCACYFLAFLFSFVVVVPLSENGHDFRGRCLLFTEGMWLSANLTVQERERFTVQEWGPPAACRFSLLASLLSLLLAAAHAWRTLFFLCKGHEGSFFSAFLNLLVSAFVVFLVFIASTIVSVGFTMWCDTITEKGTVPHSCEELQDIDLELGVDNSAFYDQFAIAQVQFRTPGWPLKALAGRGWPEDASPGQEPSKGAGHGWA

SEQ ID NO: 37287 - protein, 182 aa, Homo sapiens
  REGION 1..182: note = ENSP00000479740
MCTPVRVSIVCVMGAVGAVWTAPLPLPWAPTPSIHLREEGAAFPFCRVCVLRPRRSKWRSWDVNLGPRRRGLLGCGPCPSGKPRVHLQRTRSGAGAEAGGLPTRGSMRGCPFLGSSAAKCSLLLRPPSRGEASPWLPEFMTHPVHHQQLACVSGWLGTSLLEATCLGPHGGSWWGHHPGSRE

SEQ ID NO: 37288 - protein, 189 aa, Homo sapiens
  REGION 1..189: note = ENSP00000481424
MALNNFLFAQCACYFLAFLFSFVVVVPLSENGHDFRGRCLLFTEGMWLSANLTVQERERFTVQEWGPPAACRFSLLASLLSLLLAAAHAWRTLFFLCKGHEGSFFSAFLNLLVSAFVVFLVFIASTIVSVGFTMWCDTITEKGTVPHSCEELQDIDLELGVDNSAFYDQFAIAQGSLIDSHGVETPPGQ

SEQ ID NO: 37289 - protein, 78 aa, Homo sapiens; identical to SEQ ID NO: 37283
  REGION 1..78: note = ENSP00000486955
  VARIANT 1: note = Any amino acid

SEQ ID NO: 37290 - protein, 233 aa, Homo sapiens; identical to SEQ ID NO: 37284
  REGION 1..233: note = ENSP00000485891

SEQ ID NO: 37291 - protein, 197 aa, Homo sapiens; identical to SEQ ID NO: 37285
  REGION 1..197: note = ENSP00000487568

SEQ ID NO: 37292 - protein, 211 aa, Homo sapiens; identical to SEQ ID NO: 37286
  REGION 1..211: note = ENSP00000484829

SEQ ID NO: 37293 - protein, 182 aa, Homo sapiens; identical to SEQ ID NO: 37287
  REGION 1..182: note = ENSP00000477614

SEQ ID NO: 37294 - protein, 438 aa, Homo sapiens
  REGION 1..438: note = ENSP00000296582
MPCTCTWRNWRQWIRPLVAVIYLVSIVVAVPLCVWELQKLEVGIHTKAWFIAGIFLLLTIPISLWVILQHLVHYTQPELQKPIIRILWMVPIYSLDSWIALKYPGIAIYVDTCRECYEAYVIYNFMGFLTNYLTNRYPNLVLILEAKDQQKHFPPLCCCPPWAMGEVLLFRCKLGVLQYTVVRPFTTIVALICELLGIYDEGNFSFSNAWTYLVIINNMSQLFAMYCLLLFYKVLKEELSPIQPVGKFLCVKLVVFVSFWQAVVIALLVKVGVISEKHTWEWQTVEAVATGLQDFIICIEMFLAAIAHHYTFSYKPYVQEAEEGSCFDSFLAMWDVSDIRDDISEQVRHVGRTVRGHPRKKLFPEDQDQNEHTSLLSSSSQDAISIASSMPPSPMGHYQGFGHTVTPQTTPTTAKISDEILSDTIGEKKEPSDKSVDS

SEQ ID NO: 37295 - protein, 261 aa, Homo sapiens
  REGION 1..261: note = ENSP00000425940
MPCTCTWRNWRQWIRPLVAVIYLVSIVVAVPLCVWELQKLEVGIHTKAWFIAGIFLLLTIPISLWVILQHLVHYTQPELQKPIIRILWMVPIYSLDSWIALKYPGIAIYVDTCRECYEAYVIYNFMGFLTNYLTNRYPNLVLILEAKDQQKHFPPLCCCPPWAMGEVLLFRCKLGVLQYTVVRPFTTIVALICELLGIYDEGNFSFSNAWTYLVIINNMSQLFAMYCLLLFYKVLKEELSPIQPVGKFLCVKLVVFVSFWP

SEQ ID NO: 37296 - protein, 72 aa, Homo sapiens
  REGION 1..72: note = ENSP00000421159
LGIYDEGNFSFSNAWTYLVIINNMSQLFAMYCLLLFYKVLKEELSPIQPVGKFLCVKLVVFVSFCIRGNGKL

SEQ ID NO: 37297 - protein, 360 aa, Homo sapiens
  REGION 1..360: note = ENSP00000343507
MPGTVATLRFQLLPPEPDDAFWGAPCEQPLERRYQALPALVCIMCCLFGVVYCFFGYRCFKAVLFLTGLLFGSVVIFLLCYRERVLETQLSAGASAGIALGIGLLCGLVAMLVRSVGLFLVGLLLGLLLAAAALLGSAPYYQPGSVWGPLGLLLGGGLLCALLTLRWPRPLTTLATAVTGAALIATAADYFAELLLLGRYVVERLRAAPVPPLCWRSWALLALWPLLSLMGVLVQWRVTAEGDSHTEVVISRQRRRVQLMRIRQQEDRKEKRRKKRPPRAPLRGPRAPPRPGPPDPAYRRRPVPIKRFNGDVLSPSYIQSFRDRQTGSSLSSFMASPTDADYEYGSRGPLTACSGPPVRV

SEQ ID NO: 37298 - protein, 227 aa, Homo sapiens
  REGION 1..227: note = ENSP00000388087
MPGTVATLRFQLLPPEPDDAFWGAPCEQPLERRYQALPALVCIMCCLFGVVYCFFGYRCFKAVLFLTGLLFGSVVIFLLCYRERVLETQLSAGASAGIALGIGLLCGLVAMLVRSVGLFLVGLLLGLLLAAAALLGSAPYYQPGSVWGPLGLLLGGGLLCALLTLRWPRPLTTLATAVTGAALIATAADYFAELLLLGRYVVERLRAAPVPPLCWRSWALLALWPLL

SEQ ID NO: 37299 - protein, 360 aa, Homo sapiens; identical to SEQ ID NO: 37297
  REGION 1..360: note = ENSP00000362990

SEQ ID NO: 37300 - protein, 156 aa, Homo sapiens
  REGION 1..156: note = ENSP00000415186
MGPRFWGGPSPGSCAFPFLRPSPSSRTPRDWSASRCWTWSGAATAPTPFSPAQQPPSSHDGLSLDPSQLEPLAPRNPGPSGLCTASFTQKLRSPPAQLLPPEPDDAFWGAPCEQPLERRYQALPALVCIMCCLFGVVYCFFGYRCFKAVLFLTGLL

SEQ ID NO: 37301 - protein, 1383 aa, Homo sapiens
  REGION 1..1383: note = ENSP00000366243
MYATDSRGHSPAFLQPQNGNSRHPSGYVPGKVVPLRPPPPPKSQASAKFTSIRREDRATFAFSPEEQQAQRESQKQKRHKNTFICFAITSFSFFIALAIILGISSKYAPDENCPDQNPRLRNWDPGQDSAKQVVIKEGDMLRLTSDATVHSIVIQDGGLLVFGDNKDGSRNITLRTHYILIQDGGALHIGAEKCRYKSKATITLYGKSDEGESMPTFGKKFIGVEAGGTLELHGARKASWTLLARTLNSSGLPFGSYTFEKDFSRGLNVRVIDQDTAKILESERFDTHEYRNESRRLQEFLRFQDPGRIVAIAVGDSAAKSLLQGTIQMIQERLGSELIQGLGYRQAWALVGVIDGGSTSCNESVRNYENHSSGGKALAQREFYTVDGQKFSVTAYSEWIEGVSLSGFRVEVVDGVKLNLLDDVSSWKPGDQIVVASTDYSMYQAEEFTLLPCSECSHFQVKVKETPQFLHMGEIIDGVDMRAEVGILTRNIVIQGEVEDSCYAENQCQFFDYDTFGGHIMIMKNFTSVHLSYVELKHMGQQQMGRYPVHFHLCGDVDYKGGYRHATFVDGLSIHHSFSRCITVHGTNGLLIKDTIGFDTLGHCFFLEDGIEQRNTLFHNLGLLTKPGTLLPTDRNNSMCTTMRDKVFGNYIPVPATDCMAVSTFWIAHPNNNLINNAAAGSQDAGIWYLFHKEPTGESSGLQLLAKPELTPLGIFYNNRVHSNFKAGLFIDKGVKTTNSSAADPREYLCLDNSARFRPHQDANPEKPRVAALIDRLIAFKNNDNGAWVRGGDIIVQNSAFADNGIGLTFASDGSFPSDEGSSQEVSESLFVGESRNYGFQGGQNKYVGTGGIDQKPRTLPRNRTFPIRGFQIYDGPIHLTRSTFKKYVPTPDRYSSAIGFLMKNSWQITPRNNISLVKFGPHVSLNVFFGKPGPWFEDCEMDGDKNSIFHDIDGSVTGYKDAYVGRMDNYLIRHPSCVNVSKWNAVICSGTYAQVYVQTWSTQNLSMTITRDEYPSNPMVLRGINQKAAFPQYQPVVMLEKGYTIHWNGPAPRTTFLYLVNFNKNDWIRVGLCYPSNTSFQVTFGYLQRQNGSLSKIEEYEPVHSLEELQRKQSERKFYFDSSTGLLFLYLKAKSHRHGHSYCSSQGCERVKIQAATDSKDISNCMAKAYPQYYRKPSVVKRMPAMLTGLCQGCGTRQVVFTSDPHKSYLPVQFQSPDKAETQRGDPSVISVNGTDFTFRSAGVLLLVVDPCSVPFRLTEKTVFPLADVSRIEEYLKTGIPPRSIVLLSTRGEIKQLNISHLLVPLGLAKPAHLYDKGSTIFLGFSGNFKPSWTKLFTSPAGQGLGVLEQFIPLQLDEYGCPRATTVRRRDLELLKQASKAH

SEQ ID NO: 37302 - protein, 1320 aa, Homo sapiens
  REGION 1..1320: note = ENSP00000366266
MYATDSRGHSPAFLQPQNGNSRHPSGYVPGKVVPLRPPPPPKSQASAKFTSIRREDRATFAFSPEEQQAQRESQKQKRHKNTFICFAITSFSFFIALAIILGISSKYAPDENCPDQNPRLRNWDPGQDSAKQVVIKEGDMLRLTSDATVHSIVIQDGGLLVFGDNKDGSRNITLRTHYILIQDGGALHIGAEKCRYKSKATITLYGKSDEGESMPTFGKKFIGVEAGGTLELHGARKASWTLLARTLNSSGLPFGSYTFEKDFSRGLNVRVIDQDTAKILESERFDTHEYRNESRRLQEFLRFQDPGRIVAIAVGDSAAKSLLQGTIQMIQERLGSELIQGLGYRQAWALVGVIDGGSTSCNESVRNYENHSSGGKALAQREFYTVDGQKFSVTAYSEWIEETPQFLHMGEIIDGVDMRAEVGILTRNIVIQGEVEDSCYAENQCQFFDYDTFGGHIMIMKNFTSVHLSYVELKHMGQQQMGRYPVHFHLCGDVDYKGGYRHATFVDGLSIHHSFSRCITVHGTNGLLIKDTIGFDTLGHCFFLEDGIEQRNTLFHNLGLLTKPGTLLPTDRNNSMCTTMRDKVFGNYIPVPATDCMAVSTFWIAHPNNNLINNAAAGSQDAGIWYLFHKEPTGESSGLQLLAKPELTPLGIFYNNRVHSNFKAGLFIDKGVKTTNSSAADPREYLCLDNSARFRPHQDANPEKPRVAALIDRLIAFKNNDNGAWVRGGDIIVQNSAFADNGIGLTFASDGSFPSDEGSSQEVSESLFVGESRNYGFQGGQNKYVGTGGIDQKPRTLPRNRTFPIRGFQIYDGPIHLTRSTFKKYVPTPDRYSSAIGFLMKNSWQITPRNNISLVKFGPHVSLNVFFGKPGPWFEDCEMDGDKNSIFHDIDGSVTGYKDAYVGRMDNYLIRHPSCVNVSKWNAVICSGTYAQVYVQTWSTQNLSMTITRDEYPSNPMVLRGINQKAAFPQYQPVVMLEKGYTIHWNGPAPRTTFLYLVNFNKNDWIRVGLCYPSNTSFQVTFGYLQRQNGSLSKIEEYEPVHSLEELQRKQSERKFYFDSSTGLLFLYLKAKSHRHGHSYCSSQGCERVKIQAATDSKDISNCMAKAYPQYYRKPSVVKRMPAMLTGLCQGCGTRQVVFTSDPHKSYLPVQFQSPDKAETQRGDPSVISVNGTDFTFRSAGVLLLVVDPCSVPFRLTEKTVFPLADVSRIEEYLKTGIPPRSIVLLSTRGEIKQLNISHLLVPLGLAKPAHLYDKGSTIFLGFSGNFKPSWTKLFTSPAGQGLGVLEQFIPLQLDEYGCPRATTVRRRDLELLKQASKAH

SEQ ID NO: 37303 - protein, 580 aa, Homo sapiens
  REGION 1..580: note = ENSP00000437750
MYATDSRGHSPAFLQPQNGNSRHPSGYVPGKVVPLRPPPPPKSQASAKFTSIRREDRATFAFSPEEQQAQRESQKQKRHKNTFICFAITSFSFFIALAIILGISSKYAPDENCPDQNPRLRNWDPGQDSAKQVVIKEGDMLRLTSDATVHSIVIQDGGLLVFGDNKDGSRNITLRTHYILIQDGGALHIGAEKCRYKSKATITLYGKSDEGESMPTFGKKFIGVEAGGTLELHGARKASWTLLARTLNSSGLPFGSYTFEKDFSRGLNVRVIDQDTAKILESERFDTHEYRNESRRLQEFLRFQDPGRIVAIAVGDSAAKSLLQGTIQMIQERLGSELIQGLGYRQAWALVGVIDGGSTSCNESVRNYENHSSGGKALAQREFYTVDGQKFSVTAYSEWIEGVSLSGFRVEVVDGVKLNLLDDVSSWKPGDQIVVASTDYSMYQAEEFTLLPCSECSHFQVKVKETPQFLHMGEIIDGVDMRAEVGILTRNIVIQGEVEDSCYAENQCQFFDYDTFGGHIMIMKNFTSVHLSYVELKHMGQQQMGRYPVHFHLCGDVDYKGGYRHATFVDGLSIHHSFSR

SEQ ID NO: 37304 - protein, 376 aa, Homo sapiens
  REGION 1..376: note = ENSP00000379569
MTITRDEYPSNPMVLRGINQKAAFPQYQPVVMLEKGYTIHWNGPAPRTTFLYLVNFNKNDWIRVGLCYPSNTSFQVTFGYLQRQNGSLSKIEEYEPVHSLEELQRKQSERKFYFDSSTGLLFLYLKAKSHRHGHSYCSSQGCERVKIQAATDSKDISNCMAKAYPQYYRKPSVVKRMPAMLTGLCQGCGTRQVVFTSDPHKSYLPVQFQSPDKAETQRGDPSVISVNGTDFTFRSAGVLLLVVDPCSVPFRLTEKTVFPLADVSRIEEYLKTGIPPRSIVLLSTRGEIKQLNISHLLVPLGLAKPAHLYDKGSTIFLGFSGNFKPSWTKLFTSPAGQGLGVLEQFIPLQLDEYGCPRATTVRRRDLELLKQASKAH

SEQ ID NO: 37305 - protein, 178 aa, Homo sapiens
  REGION 1..178: note = ENSP00000366254
LIRHPSCVNVSKWNAVICSGTYAQVYVQTWSTQNLSMTITRDEYPSNPMVLRGINQKAAFPQYQPVVMLEKGYTIHWNGPAPRTTFLYLVNFNKNDWIRVGLCYPSNTSFQVTFGYLQRQNGSLSKIEEYEPVHSLEELQRKQSERKFYFDSSTGDGVSLCCPGWSAVHRHSCGTLQP

SEQ ID NO: 37306 - protein, 176 aa, Homo sapiens
  REGION 1..176: note = ENSP00000366242
GFLMKNSWQITPRNNISLVKFGPHVSLNVFFGKPGPWFEDCEMDGDKNSIFHDIDGSVTGYKDAYVGRMDNYLIRHPSCVNVSKWNAVICSGTYAQVYVQTWSTQNLSMTITRDEYPSNPMVLRGINQKAAFPQYQPVVMLEKGYTIHWNGPAPRTTFLYLVNFNKYVSVTVISNS

SEQ ID NO: 37307 - protein, 18 aa, Homo sapiens
  REGION 1..18: note = ENSP00000444571
MYATDSRGHSPAFLQPQN

SEQ ID NO: 37308 - protein, 491 aa, Homo sapiens
  REGION 1..491: note = ENSP00000296978
MIATGGVITGLAALKRQDSARSQQHVNLSPSPATQEKKPIRRRPRADVVVVRGKIRLYSPSGFFLILGVLISIIGIAMAVLGYWPQKEHFIDAETTLSTNETQVIRNEGGVVVRFFEQHLHSDKMKMLGPFTMGIGIFIFICANAILHENRDKETKIIHMRDIYSTVIDIHTLRIKEQRQMNGMYTGLMGETEVKQNGSSCASRLAANTIASFSGFRSSFRMDSSVEEDELMLNEGKSSGHLMPPLLSDSSVSVFGLYPPPSKTTDDKTSGSKKCETKSIVSSSISAFTLPVIKLNNCVIDEPSIDNITEDADNLKSRSRNLSMDSLVVPLPNTSESFQPVSTVLPRNNSIGESLSSQYKSSMALGPGAGQLLSPGAARRQFGSNTSLHLLSSHSKSLDLDRGPSTLTVQAEQRKHPSWPRLDRNNSKGYMKLENKEDPMDRLLVPQVAIKKDFTNKEKLLMISRSHNNLSFEHDEFLSNNLKRGTSETRF

SEQ ID NO: 37309 - protein, 491 aa, Homo sapiens; identical to SEQ ID NO: 37308
  REGION 1..491: note = ENSP00000376224

SEQ ID NO: 37310 - protein, 491 aa, Homo sapiens; identical to SEQ ID NO: 37308
  REGION 1..491: note = ENSP00000480294

SEQ ID NO: 37311 - protein, 491 aa, Homo sapiens; identical to SEQ ID NO: 37308
  REGION 1..491: note = ENSP00000438928

SEQ ID NO: 37312 - protein, 170 aa, Homo sapiens
  REGION 1..170: note = ENSP00000366528
MQNRTGLILCALALLMGFLMVCLGAFFISWGSIFDCQGSLIAAYLLLPLGFVILLSGIFWSNYRQVTESKGVLRHMLRQHLAHGALPVATVDRPDFYPPAYEESLEVEKQSCPAEREASGIPPPLYTETGLEFQDGNDSHPEAPPSYRESIAGLVVTAISEDAQRRGQEC

SEQ ID NO: 37313 - protein, 123 aa, Homo sapiens
  REGION 1..123: note = ENSP00000361355
MATAAGATYFQRGSLFWFTVITLSFGYYTWVVFWPQSIPYQNLGPLGPFTQYLVDHHHTLLCNGYWLAWLIHVGESLYAIVLCKHKGITSGRAQLLWFLQTFFFGIASLTILIAYKRKRQKQT

SEQ ID NO: 37314 - protein, 84 aa, Homo sapiens
  REGION 1..84: note = ENSP00000361349
MATAAGATYFQRGSLFWFTVITLSFGYYTWVVFWPQSIPYQNLGPLGPFTQYLVDHHHTLLCNGYWLAWLIHVGESLYAIVLCK

SEQ ID NO: 37315 - protein, 103 aa, Homo sapiens
  REGION 1..103: note = ENSP00000361348
MATAAGATYFQRGSLFWFTVITLSFGYYTWVVFWPQSIPYQNLGPLGPFTQYLVDHHHTLLCNGYWLAWLIHVGESLYAIVLCKQNELRIRIKMRKLILRDSE

SEQ ID NO: 37316 - protein, 144 aa, Homo sapiens
  REGION 1..144: note = ENSP00000361347
  VARIANT 1: note = Any amino acid
XTAGELPANSVSGFFKRMVKSEASNAATAYFRPARPLPSLVTVLGLGYFAWVVFWPQSIPYQNLGPLGPFTQYLVDHHHTLLCNGYWLAWLIHVGESLYAIVLCKHKGITSGRAQLLWFLQTFFFGIASLTILIAYKRKRQKQT

SEQ ID NO: 37317 - protein, 101 aa, Homo sapiens
  REGION 1..101: note = ENSP00000393450
  VARIANT 1: note = Any amino acid
XEFLRSVWVVFWPQSIPYQNLGPLGPFTQYLVDHHHTLLCNGYWLAWLIHVGESLYAIVLCKHKGITSGRAQLLWFLQTFFFGIASLTILIAYKRKRQKQT

SEQ ID NO: 37318 - protein, 101 aa, Homo sapiens
  REGION 1..101: note = ENSP00000482766
MATAAGATYFQRGSLFWFTVITLSFGYYTPQQRSETLSKKKERKKIEAKNGDPNDCSEFLRGLSSGLRVSLIRTLGPWAPSLSTWWTTITPSCAMGIGLPG

SEQ ID NO: 37319 - protein, 103 aa, Homo sapiens; identical to SEQ ID NO: 37315
  REGION 1..103: note = ENSP00000361351

SEQ ID NO: 37320 - protein, 349 aa, Homo sapiens
  REGION 1..349: note = ENSP00000310110
MHQSLTQQRSSDMSLPDSMGAFNRRKRNSIYVTVTLLIVSVLILTVGLAATTRTQNVTVGGYYPGVILGFGSFLGIIGSNLIENKRQMLVASIVFISFGVIAAFCCAIVDGVFAARHIDLKPLYANRCHYVPKTSQKEAEEVISSSTKNSPSTRVMRNLTQAAREVNCPHLSREFCTPRIRGNTCFCCDLYNCGNRVEITGGYYEYIDVSSCQDIIHLYHLLWSATILNIVGLFLGIITAAVLGGFKDMNPTLPALNCSVENTHPTVSYYAHPQVASYNTYYHSPPHLPPYSAYDFQHSGVFPSSPPSGLSDEPQSASPSPSYMWSSSAPPRYSPPYYPPFEKPPPYSP

SEQ ID NO: 37321 - protein, 325 aa, Homo sapiens
  REGION 1..325: note = ENSP00000360420
MHQSLTQQRSSDMSLPDSMGAFNRRKRNSIYVTVTLLIVSVLILTVGLAATTRTQNVTVGGYYPGVILGFGSFLGIIGSNLIENKRQMLVASIVFISFGVIAAFCCAIVDGVFAARHIDLKPLYANRCHYVPKTSQKEAEEVNCPHLSREFCTPRIRGNTCFCCDLYNCGNRVEITGGYYEYIDVSSCQDIIHLYHLLWSATILNIVGLFLGIITAAVLGGFKDMNPTLPALNCSVENTHPTVSYYAHPQVASYNTYYHSPPHLPPYSAYDFQHSGVFPSSPPSGLSDEPQSASPSPSYMWSSSAPPRYSPPYYPPFEKPPPYSP

SEQ ID NO: 37322 - protein, 185 aa, Homo sapiens
  REGION 1..185: note = ENSP00000360403
MVNCPHLSREFCTPRIRGNTCFCCDLYNCGNRVEITGGYYEYIDVSSCQDIIHLYHLLWSATILNIVGLFLGIITAAVLGGFKDMNPTLPALNCSVENTHPTVSYYAHPQVASYNTYYHSPPHLPPYSAYDFQHSGVFPSSPPSGLSDEPQSASPSPSYMWSSSAPPRYSPPYYPPFEKPPPYSP

SEQ ID NO: 37323 - protein, 149 aa, Homo sapiens
  REGION 1..149: note = ENSP00000428013
MHQSLTQQRSSDMSLPDSMGAFNRRKRNSIYVTVTLLIVSVLILTVGLAATTRTQNVTVGGYYPGVILGFGSFLGIIGSNLIENKRQMLVASIVFISFGVIAAFCCAIVDGVFAARHIDLKPLYANRCHYVPKTSQKEAEENPTLPALN

SEQ ID NO: 37324 - protein, 241 aa, Homo sapiens
  REGION 1..241: note = ENSP00000405781
MHQSLTQQRSSDMSLPDSMGAFNRRKRNSIYVTVTLLIVSVLILTVGLAATTRTQNVTVGGYYPGVILGFGSFLGIIGSNLIENKRQMLVASIVFISFGVIAAFCCAIVDGVFAARHIDLKPLYANRCHYVPKTSQKEAEENPTLPALNCSVENTHPTVSYYAHPQVASYNTYYHSPPHLPPYSAYDFQHSGVFPSSPPSGLSDEPQSASPSPSYMWSSSAPPRYSPPYYPPFEKPPPYSP

SEQ ID NO: 37325 - protein, 15 aa, Homo sapiens
  REGION 1..15: note = ENSP00000488630
MQPPVPGPLGLLDPA

SEQ ID NO: 37326 - protein, 15 aa, Homo sapiens
  REGION 1..15: note = ENSP00000488348
MQPPVPGPLGLLDPA

SEQ ID NO: 37327 - protein, 166 aa, Homo sapiens
  REGION 1..166: note = ENSP00000479391
MQPPVPGPLGLLDPAEGLSRRKKTSLWFVGSLLLVSVLIVTVGLAATTRTENVTVGGYYPGIILGFGSFLGIIGINLVENRRQMLVAAIVFISFGVVAAFCCAIVDGVFAAQHIEPRPLTTGRCQFYSSGVGYLYDVYQTEVSRSTEIHVGFAQLTPPTPRGFPCT

SEQ ID NO: 37328 - protein, 326 aa, Homo sapiens
  REGION 1..326: note = ENSP00000364502
MQPPVPGPLGLLDPAEGLSRRKKTSLWFVGSLLLVSVLIVTVGLAATTRTENVTVGGYYPGIILGFGSFLGIIGINLVENRRQMLVAAIVFISFGVVAAFCCAIVDGVFAAQHIEPRPLTTGRCQFYSSGVGYLYDVYQTEVTCHSLDGKCQLKVRSNTCYCCDLYACGSAEPSPAYYEFIGVSGCQDVLHLYRLLWASAVLNVLGLFLGIITAAVLGAFKDMVPLSQLAYGPAVPPQTLYNPAQQILAYAGFRLTPEPVPTCSSYPLPLQPCSRFPVAPSSALASSEDLQPPSPSSSGSGLPGQAPPCYAPTYFPPGEKPPPYAP

SEQ ID NO: 37329 - protein, 531 aa, Homo sapiens
  REGION 1..531: note = ENSP00000373594
MAVAPSFNMTNPQPAIEGGISEVEIISQQVDEETKSIAPVQLVNFAYRDLPLAAVDLSTAGSQLLSNLDEDYQREGSNWLKPCCGKRAAVWQVFLLSASLNSFLVACVILVVILLTLELLIDIKLLQFSSAFQFAGVIHWISLVILSVFFSETVLRIVVLGIWDYIENKIEVFDGAVIILSLAPMVASTVANGPRSPWDAISLIIMLRIWRVKRVIDAYVLPVKLEMEMVIQQYEKAKVIQDEQLERLTQICQEQGFEIRQLRAHLAQQDLDLAAEREAALQAPHVLSQPRSRFKVLEAGTWDEETAAESVVEELQPSQEATMKDDMNSYISQYYNGPSSDSGVPEPAVCMVTTAAIDIHQPNISSDLFSLDMPLKLGGNGTSATSESASRSSVTRAQSDSSQTLGSSMDCSTAREEPSSEPGPSPPPLPSQQQVEEATVQDLLSSLSEDPCPSQKALDPAPLARPSPAGSAQTSPELEHRVSLFNQKNQEGFTVFQIRPVIHFQPTVPMLEDKFRSLESKEQKLHRVPEA

SEQ ID NO: 37330 - protein, 101 aa, Homo sapiens
  REGION 1..101: note = ENSP00000435049
MAVAPSFNMTNPQPAIEGGISEVEIISQQVDEETKSIAPVQLVNFAYRDLPLAAVDLSTAGSQLLSNLDEDYQREGSNWLKPCCGKRAAVWQFPAHSSLLA

SEQ ID NO: 37331 - protein, 121 aa, Homo sapiens
  REGION 1..121: note = ENSP00000453957
MAVAPSFNMTNPQPAIEGGISEVEIISQQVDEETKSIAPVQLVNFAYRDLPLAAVDLSTAGSQLLSNLDEDYQREGFQRIPVCWRDSLDQPGHSVRVLLRDCSTDCGAWDLGLHRKQNRGV

SEQ ID NO: 37332 - protein, 475 aa, Homo sapiens
  REGION 1..475: note = ENSP00000376227
MGEAPSPAPALWDWDYLDRCFARHRVCISFGLWICASSCWIAAHALLLYLRCAQKPRQDQSALCAACCLLTSLCDTVGALLARQLTIQVFTGAYLAAIDLVNFMFILFPVCGSKFKSNSDREARERKRRRQLRASVFALALPLSLGPCWALWVAVPKASATIRGPQRRLLASLLQENTEILGYLLGSVAAFGSWASRIPPLSRIAPPPTLGITTQHEIWRGQMSKPSQSPSRSPSGHWRAAAQRQVLGTEMCRGKTFPSIHLWTRLLSALAGLLYASAIVAHDQHPEYLLRATPWFLTSLGRAALDLAIIFLSCVMKSKMRQALGFAKEARESPDTQALLTCAEKEEENQENLDWVPLTTLSHCKSLRTMTAISRYMELTIEPVQQAGCSATRLPGDGQTSAGDASLQDPPSYPPVQVIRARVSSGSSSEVSSINSDLEWDPEDVNLEGSKENVELLGSQVHQDSVRTAHLSDDD

SEQ ID NO: 37333 - protein, 197 aa, Homo sapiens
  REGION 1..197: note = ENSP00000409963
LRATPWFLTSLGRAALDLAIIFLSCVMKSKMRQALGFAKEARESPDTQALLTCAEKEEENQENLDWVPLTTLSHCKSLRTMTAISRYMELTIEPVQQAGCSATRLPGDGQTSAGDASLQDPPSYPPVQVIRARVSSGSSSEVSSINSDLEQKYWEALNSEQWDPEDVNLEGSKENVELLGSQVHQDSVRTAHLSDDD

SEQ ID NO: 37334 - protein, 396 aa, Homo sapiens
  REGION 1..396: note = ENSP00000371402
MGEAPSPAPALWDWDYLDRCFARHRVCISFGLWICASSCWIAAHALLLYLRCAQKPRQDQSALCAACCLLTSLCDTVGALLARQLTIQVFTGAYLAAIDLVNFMFILFPVCGSKFKSNSDREARERKRRRQLRASVFALALPLSLGPCWALWVAVPKASATIRGPQRRLLASLLQENTEILGYLLGSVAAFGSWASRIPPLSRICRGKTFPSIHLWTRLLSALAGLLYASAIVAHDQHPEYLLRATPWFLTSLGRAALDLAIIFLSCVMKSKMRQALGFAKEARESPDTQALLTCAEKEEENQENLDWVPLTTLSHCKSLRTMTAISRYMELTIEPVQQAAVPPGCQVTGRRAPEMRPCRTPRRTLPFRSSGPGCLPAAPLRSPPSTPTWSGTLKM

SEQ ID NO: 37335 - protein, 428 aa, Homo sapiens
  REGION 1..428: note = ENSP00000333355
MGEAPSPAPALWDWDYLDRCFARHRVCISFGLWICASSCWIAAHALLLYLRCAQKPRQDQSALCAACCLLTSLCDTVGALLARQLTIQVFTGAYLAAIDLVNFMFILFPVCGSKFKSNSDREARERKRRRQLRASVFALALPLSLGPCWALWVAVPKASATIRGPQRRLLASLLQENTEILGYLLGSVAAFGSWASRIPPLSRICRGKTFPSIHLWTRLLSALAGLLYASAIVAHDQHPEYLLRATPWFLTSLGRAALDLAIIFLSCVMKSKMRQALGFAKEARESPDTQALLTCAEKEEENQENLDWVPLTTLSHCKSLRTMTAISRYMELTIEPVQQAGCSATRLPGDGQTSAGDASLQDPPSYPPVQVIRARVSSGSSSEVSSINSDLEWDPEDVNLEGSKENVELLGSQVHQDSVRTAHLSDDD

SEQ ID NO: 37336 - protein, 438 aa, Homo sapiens
  REGION 1..438: note = ENSP00000418674
MGEAPSPAPALWDWDYLDRCFARHRVCISFGLWICASSCWIAAHALLLYLRCAQKPRQDQSALCAACCLLTSLCDTVGALLARQLTIQVFTGAYLAAIDLVNFMFILFPVCGSKFKSNSDREARERKRRRQLRASVFALALPLSLGPCWALWVAVPKASATIRGPQRRLLASLLQENTEILGYLLGSVAAFGSWASRIPPLSRICRGKTFPSIHLWTRLLSALAGLLYASAIVAHDQHPEYLLRATPWFLTSLGRAALDLAIIFLSCVMKSKMRQALGFAKEARESPDTQALLTCAEKEEENQENLDWVPLTTLSHCKSLRTMTAISRYMELTIEPVQQAGCSATRLPGDGQTSAGDASLQDPPSYPPVQVIRARVSSGSSSEVSSINSDLEKYWEALNSEQWDPEDVNLEGSKENVELLGSQVHQDSVRTAHLSDDD

SEQ ID NO: 37337 - protein, 261 aa, Homo sapiens
  REGION 1..261: note = ENSP00000414333
NFMFILFPVCGSKFKSNSDREARERKRRRQLRASVFALALPLSLGPCWALWVAVPKASATIRGPQRRLLASLLQENTEILGYLLGSVAAFGSWASRIPPLSRISKMRQALGFAKEARESPDTQALLTCAEKEEENQENLDWVPLTTLSHCKSLRTMTAISRYMELTIEPVQQAGCSATRLPGDGQTSAGDASLQDPPSYPPVQVIRARVSSGSSSEVSSINSDLEWDPEDVNLEGSKENVELLGSQVHQDSVRTAHLSDDD

SEQ ID NO: 37338 - protein, 119 aa, Homo sapiens
  REGION 1..119: note = ENSP00000403053
MKSKMRQALGFAKEARESPDTQALLTCAEKEEENQENLDWVPLTTLSHCKSLRTMTAISRYMELTIEPVQQAAVPPGCQVTGRRAPEMRPCRTPRRTLPFRSSGPGCLPAAPLSGTLKM

SEQ ID NO: 37339 - protein, 150 aa, Homo sapiens
  REGION 1..150: note = ENSP00000414077
MFILFPVCGSKFKSNSDREARERKRRRQLRASVFALALPLSLGPCWALWVAVPKASATIRGPQRRLLASLLQENTEILGYLLGSVAAFGSWASRIPPLSRIMESRCVAQAGVQWRDLGSLQPSPPNFKQFSCLSLPSSWDYSCQWSCRSC

SEQ ID NO: 37340 - protein, 113 aa, Homo sapiens
  REGION 1..113: note = ENSP00000328300
MFILFPVCGSKFKSNSDREARERKRRRQLRASVFALALPLSLGPCWALWVAVPKASATIRGPQRRLLASLLQENTEILGYLLGSVAAFGSWASRIPPLSRIVRPGVGMGLWVT

SEQ ID NO: 37341 - protein, 121 aa, Homo sapiens
  REGION 1..121: note = ENSP00000390186
MGEAPSPAPALWDWDYLDRCFARHRVCISFGLWICASSCWIAAHALLLYLRCAQKPRQDQSALCAACCLLTSLCDTVGALLARQLTIQSVDPNSSLIQIGKPERGRGGGSSGPVCLPWPCR

SEQ ID NO: 37342 - protein, 253 aa, Homo sapiens
  REGION 1..253: note = ENSP00000365182
MMAQSKANGSHYALTAIGLGMLVLGVIMAMWNLVPGFSAAEKPTAQGSNKTEVGGGILKSKTFSVAYVLVGAGVMLLLLSICLSIRDKRKQRQGEDLAHVQHPTGAGPHAQEEDSQEEEEEDEEAASRYYVPSYEEVMNTNYSEARGEEQNPRLSISLPSYESLTGLDETTPTSTRADVEASPGNPPDRQNSKLAKRLKPLKVRRIKSEKLHLKDFRINLPDKNVPPPSIEPLTPPPQYDEVQEKAPDTRPPD

SEQ ID NO: 37343 - protein, 121 aa, Homo sapiens
  REGION 1..121: note = ENSP00000412298
MMAQSKANGSHYALTAIGLGMLVLGVIMAMWNLVPGFSAAEKPTAQGSNKTEVGGGILKSKTFSVAYVLVGAGVMLLLLSICLSIRDKRKQRQGEDLAHVQHPTGAGPHAQEEDSQEEEEE

SEQ ID NO: 37344 - protein, 253 aa, Homo sapiens; identical to SEQ ID NO: 37342
  REGION 1..253: note = ENSP00000383600

SEQ ID NO: 37345 - protein, 135 aa, Homo sapiens
  REGION 1..135: note = ENSP00000409665
MMAQSKANGSHYALTAIGLGMLVLGVIMAMWNLVPGFSAAEKPTAQGSNKTEVGGGILKSKTFSVAYVLVGAGVMLLLLSICLSIRDKRKQRQGEDLAHVQHPTGAGPHAQEEDRRKKRRMRRLPQGTMFPATRK

SEQ ID NO: 37346 - protein, 253 aa, Homo sapiens; identical to SEQ ID NO: 37342
  REGION 1..253: note = ENSP00000365176

SEQ ID NO: 37347 - protein, 253 aa, Homo sapiens; identical to SEQ ID NO: 37342
  REGION 1..253: note = ENSP00000394899

SEQ ID NO: 37348 - protein, 807 aa, Homo sapiens
  REGION 1..807: note = ENSP00000355800
MMDSPFLELWQSKAVSIREQLGLGDRPNDSYCYNSAKNSTVLQGVTFGGIPTVLLIDVSCFLFLILVFSIIRRRFWDYGRIALVSEADSESRFQRLSSTSSSGQQDFENELGCCPWLTAIFRLHDDQILEWCGEDAIHYLSFQRHIIFLLVVVSFLSLCVILPVNLSGDLLDKDPYSFGRTTIANLQTDNDLLWLHTIFAVIYLFLTVGFMRHHTQSIKYKEENLVRRTLFITGLPRDARKETVESHFRDAYPTCEVVDVQLCYNVAKLIYLCKEKKKTEKSLTYYTNLQVKTGQRTLINPKPCGQFCCCEVLGCEWEDAISYYTRMKDRLLERITEEERHVQDQPLGMAFVTFQEKSMATYILKDFNACKCQSLQCKGEPQPSSHSRELYTSKWTVTFAADPEDICWKNLSIQGLRWWLQWLGINFTLFLGLFFLTTPSIILSTMDKFNVTKPIHALNNPIISQFFPTLLLWSFSALLPSIVYYSTLLESHWTKSGENQIMMTKVYIFLIFMVLILPSLGLTSLDFFFRWLFDKTSSEASIRLECVFLPDQGAFFVNYVIASAFIGNGMELLRLPGLILYTFRMIMAKTAADRRNVKQNQAFQYEFGAMYAWMLCVFTVIVAYSITCPIIAPFGLIYILLKHMVDRHNLYFVYLPAKLEKGIHFAAVNQALAAPILCLFWLYFFSFLRLGMKAPATLFTFLVLLLTILVCLAHTCFGCFKHLSPLNYKTEEPASDKGSEAEAHMPPPFTPYVPRILNGLASERTALSPQQQQQQTYGAIHNISGTIPGQCLAQSATGSVAAAPQEA

SEQ ID NO: 37349 - protein, 118 aa, Homo sapiens
  REGION 1..118: note = ENSP00000409002
MMDSPFLELWQSKAVSIREQLGLGDRPNDSYCYNSAKNSTVLQGVTFGGIPTVLLIDVSCFLFLILVFSIIRRRFWDYGRIALVSEADSESRFQRLSSTSSSGQQDFENELGCCPWLT

SEQ ID NO: 37350 - protein, 82 aa, Homo sapiens
  REGION 1..82: note = ENSP00000445237
MKDRLLERITEEERHVQDQPLGMAFVTFQEKSMATYILKDFNACKCQSLQCKGEPQPSSHSRELYTSKWTVTFAADPEDICW

SEQ ID NO: 37351 - protein, 163 aa, Homo sapiens
  REGION 1..163: note = ENSP00000455099
MSEQGRETEEEEGGGGASDTAPMLPRGPPDHQASALTCPGWSGPPLLPGRLLAGLLLHLLLPAAAFLLVLLPAAAVVYLGFLCHSRVHPAPGPRCRALFSDRGSAALIVFGLLSLPPLLVLASAVRARLARRLRPLLPPPAGTPGPRRPPGRPDEDEQLCAWV

SEQ ID NO: 37352 - protein, 226 aa, Homo sapiens
  REGION 1..226: note = ENSP00000378138
METVVIVAIGVLATIFLASFAALVLVCRQRYCRPRDLLQRYDSKPIVDLIGAMETQSEPSELELDDVVITNPHIEAILENEDWIEDASGLMSHCIAILKICHTLTEKLVAMTMGSGAKMKTSASVSDIIVVAKRISPRVDDVVKSMYPPLDPKLLDARTTALLLSVSHLVLVTRNACHLTGGLDWIDQSLSAAEEHLEVLREAALASEPDKGLPGPEGFLQEQSAI

SEQ ID NO: 37353 - protein, 226 aa, Homo sapiens; identical to SEQ ID NO: 37352
  REGION 1..226: note = ENSP00000463245

SEQ ID NO: 37354 - protein, 137 aa, Homo sapiens
  REGION 1..137: note = ENSP00000398446
METVVIVAIGVLATIFLASFAALVLVCRQRYCRPRDLLQRYDSKPIVDLIGAMETQSEPSELELDDVVITNPHIEAILENEDWIEDASGLMSHCIAILKICHTLTEKLVAMTMGSGAKMKTSASVSDIIVVAKRISP

SEQ ID NO: 37355 - protein, 201 aa, Homo sapiens
  REGION 1..201: note = ENSP00000261713
METVVIVAIGVLATIFLASFAALVLVCRQRYCRPRDLLQRYDSKPIVDLIGAMETQSEPSELELDDVVITNPHIEAILENEDWIEDASGLMSHCIAILKICHTLTEKLVAMTMGSGAKMKTSASVSDIIVVAKRISPRTTALLLSVSHLVLVTRNACHLTGGLDWIDQSLSAAEEHLEVLREAALASEPDKGLPGPEGFLQ

SEQ ID NO: 37356 - protein, 138 aa, Homo sapiens
  REGION 1..138: note = ENSP00000464537
METVVIVAIGVLATIFLASFAALVLVCRQRYCRPRDLLQRYDSKPIVDLIGAMETQSEPSELELDDVVITNPHIEAILENEDWIEDASGLMSHCIAILKICHTLTEKLVAMTMGSGAKMKTSASVSDIIVVAKRISPR

SEQ ID NO: 37357 - protein, 222 aa, Homo sapiens
  REGION 1..222: note = ENSP00000406394
METVVIVAIGVLATIFLASFAALVLVCRQRYCRPRDLLQRYDSKPIVDLIGAMETQSEPSELELDDVVITNPHIEAILENEDWIEDASGLMSHCIAILKICHTLTEKLVAMTMGSGAKMKTSASVSDIIVVAKRISPRVDDVVKSMYPPLDPKLLDARTTALLLSVSHLVLVTRNACHLTGGLDWIDQSLSAAEEHLEVLREAALASEPDKGLPGPEGFLQE

SEQ ID NO: 37358 - protein, 93 aa, Homo sapiens
  REGION 1..93: note = ENSP00000463539
METVVIVAIGVLATIFLASFAALVLVCRQRYCRPRDLLQRYDSKPIVDLIGAMETQSEPSELELDDVVITNPHIEAILENEDWIEDASGLMSH

SEQ ID NO: 37359 - protein, 359 aa, Homo sapiens
  REGION 1..359: note = ENSP00000259365
MSYRRELEKYRDLDEDEILGALTEEELRTLENELDELDPDNALLPAGLRQKDQTTKAPTGPFKREELLDHLEKQAKEFKDREDLVPYTGEKRGKVWVPKQKPLDPVLESVTLEPELEEALANASDAELCDIAAILGMHTLMSNQQYYQALSSSSIMNKEGLNSVIKPTQYKPVPDEEPNSTDVEETLERIKNNDPKLEEVNLNNIRNIPIPTLKAYAEALKENSYVKKFSIVGTRSNDPVAYALAEMLKENKVLKTLNVESNFISGAGILRLVEALPYNTSLVEMKIDNQSQPLGNKVEMEIVSMLEKNATLLKFGYHFTQQGPRLRASNAMMNNNDLVRKRRLADLTGPIIPKCRSGV

SEQ ID NO: 37360 - protein, 232 aa, Homo sapiens
  REGION 1..232: note = ENSP00000364318
MSQVLSILGMHTLMSNQQYYQALSSSSIMNKEGLNSVIKPTQYKPVPDEEPNSTDVEETLERIKNNDPKLEEVNLNNIRNIPIPTLKAYAEALKENSYVKKFSIVGTRSNDPVAYALAEMLKENKVLKTLNVESNFISGAGILRLVEALPYNTSLVEMKIDNQSQPLGNKVEMEIVSMLEKNATLLKFGYHFTQQGPRLRASNAMMNNNDLVRKRRLADLTGPIIPKCRSGV

SEQ ID NO: 37361 - protein, 359 aa, Homo sapiens; identical to SEQ ID NO: 37359
  REGION 1..359: note = ENSP00000378637

SEQ ID NO: 37362 - protein, 147 aa, Homo sapiens
  REGION 1..147: note = ENSP00000437937
MHSFRLARLSSWRVHAGLVSHSAVRPHQGALVERIIPHPLYSAQNHDYDVALLRLQTALNFSDTVGAVCLPAKEQHFPKGSRCWVSGWGHTHPSHTYSSDMLQDTVVPLFSTQLCNSSCVYSGALTPRMLCAGYLDGRADACQDSLL

SEQ ID NO: 37363 - protein, 198 aa, Homo sapiens
  REGION 1..198: note = ENSP00000437761
MHSFRLARLSSWRVHAGLVSHSAVRPHQGALVERIIPHPLYSAQNHDYDVALLRLQTALNFSDTVGAVCLPAKEQHFPKGSRCWVSGWGHTHPSHTYSSDMLQDTVVPLFSTQLCNSSCVYSGALTPRMLCAGYLDGRADACQGDSGGPLVCPDGDTWRLVGVVSWGRGCAEPNHPGVYAKVAEFLDWIHDTAQDSLL

SEQ ID NO: 37364 - protein, 457 aa, Homo sapiens
  REGION 1..457: note = ENSP00000299882
MSLMLDDQPPMEAQYAEEGPGPGIFRAEPGDQQHPISQAVCWRSMRRGCAVLGALGLLAGAGVGSWLLVLYLCPAASQPISGTLQDEEITLSCSEASAEEALLPALPKTVSFRINSEDFLLEAQVRDQPRWLLVCHEGWSPALGLQICWSLGHLRLTHHKGVNLTDIKLNSSQEFAQLSPRLGGFLEEAWQPRNNCTSGQVVSLRCSECGARPLASRIVGGQSVAPGRWPWQASVALGFRHTCGGSVLAPRWVVTAAHCMHSFRLARLSSWRVHAGLVSHSAVRPHQGALVERIIPHPLYSAQNHDYDVALLRLQTALNFSDTVGAVCLPAKEQHFPKGSRCWVSGWGHTHPSHTYSSDMLQDTVVPLFSTQLCNSSCVYSGALTPRMLCAGYLDGRADACQGDSGGPLVCPDGDTWRLVGVVSWGRGCAEPNHPGVYAKVAEFLDWIHDTAQDSLL

SEQ ID NO: 37365 - protein, 448 aa, Homo sapiens
  REGION 1..448: note = ENSP00000441104
MTGWGQWRAIILHSPDPPWGQPHMIDVSQAVCWRSMRRGCAVLGALGLLAGAGVGSWLLVLYLCPAASQPISGTLQDEEITLSCSEASAEEALLPALPKTVSFRINSEDFLLEAQVRDQPRWLLVCHEGWSPALGLQICWSLGHLRLTHHKGVNLTDIKLNSSQEFAQLSPRLGGFLEEAWQPRNNCTSGQVVSLRCSECGARPLASRIVGGQSVAPGRWPWQASVALGFRHTCGGSVLAPRWVVTAAHCMHSFRLARLSSWRVHAGLVSHSAVRPHQGALVERIIPHPLYSAQNHDYDVALLRLQTALNFSDTVGAVCLPAKEQHFPKGSRCWVSGWGHTHPSHTYSSDMLQDTVVPLFSTQLCNSSCVYSGALTPRMLCAGYLDGRADACQGDSGGPLVCPDGDTWRLVGVVSWGRGCAEPNHPGVYAKVAEFLDWIHDTAQDSLL

SEQ ID NO: 37366 - protein, 413 aa, Homo sapiens
  REGION 1..413: note = ENSP00000445528
MRRGCAVLGALGLLAGAGVGSWLLVLYLCPAASQPISGTLQDEEITLSCSEASAEEALLPALPKTVSFRINSEDFLLEAQVRDQPRWLLVCHEGWSPALGLQICWSLGHLRLTHHKGVNLTDIKLNSSQEFAQLSPRLGGFLEEAWQPRNNCTSGQVVSLRCSECGARPLASRIVGGQSVAPGRWPWQASVALGFRHTCGGSVLAPRWVVTAAHCMHSFRLARLSSWRVHAGLVSHSAVRPHQGALVERIIPHPLYSAQNHDYDVALLRLQTALNFSDTVGAVCLPAKEQHFPKGSRCWVSGWGHTHPSHTYSSDMLQDTVVPLFSTQLCNSSCVYSGALTPRMLCAGYLDGRADACQGDSGGPLVCPDGDTWRLVGVVSWGRGCAEPNHPGVYAKVAEFLDWIHDTAQDSLL

SEQ ID NO: 37367 - protein, 388 aa, Homo sapiens
  REGION 1..388: note = ENSP00000440783
MSLMLDDQPPMEAQYAEEGPGPGIFRAEPGDQQHPISQAVCWRSMRRGCAVLGALGLLAGAGVGSWLLVLYLCPAASQPISGTLQDEEITLSCSEASAEEALLPALPKTVSFRINSEDFLLEAQVRDQPRWLLVCHEGWSPALGLQICWSLGHLRLTHHKGVNLTDIKLNSSQEFAQLSPRLGGFLEEAWQPSFRLARLSSWRVHAGLVSHSAVRPHQGALVERIIPHPLYSAQNHDYDVALLRLQTALNFSDTVGAVCLPAKEQHFPKGSRCWVSGWGHTHPSHTYSSDMLQDTVVPLFSTQLCNSSCVYSGALTPRMLCAGYLDGRADACQGDSGGPLVCPDGDTWRLVGVVSWGRGCAEPNHPGVYAKVAEFLDWIHDTAQDSLL

SEQ ID NO: 37368 - protein, 344 aa, Homo sapiens
  REGION 1..344: note = ENSP00000445930
MRRGCAVLGALGLLAGAGVGSWLLVLYLCPAASQPISGTLQDEEITLSCSEASAEEALLPALPKTVSFRINSEDFLLEAQVRDQPRWLLVCHEGWSPALGLQICWSLGHLRLTHHKGVNLTDIKLNSSQEFAQLSPRLGGFLEEAWQPSFRLARLSSWRVHAGLVSHSAVRPHQGALVERIIPHPLYSAQNHDYDVALLRLQTALNFSDTVGAVCLPAKEQHFPKGSRCWVSGWGHTHPSHTYSSDMLQDTVVPLFSTQLCNSSCVYSGALTPRMLCAGYLDGRADACQGDSGGPLVCPDGDTWRLVGVVSWGRGCAEPNHPGVYAKVAEFLDWIHDTAQDSLL

SEQ ID NO: 37369 - protein, 17 aa, Homo sapiens
  REGION 1..17: note = ENSP00000443681
MHSFRLARLSSWRVHAG

SEQ ID NO: 37370 - protein, 10 aa, Homo sapiens
  REGION 1..10: note = ENSP00000445502
MHSFRLARLS

SEQ ID NO: 37371 - protein, 44 aa, Homo sapiens
  REGION 1..44: note = ENSP00000440976
MSLMLDDQPPMEAQYAEEGPGPGIFRAEPGDQQHPSRPDWAIGE

SEQ ID NO: 37372 - protein, 774 aa, Homo sapiens
  REGION 1..774: note = ENSP00000256062
MNPFYFHAVNIILHCLVTLVLMYTCDKTVFKNRGLAFVTALLFAVHPIHTEAVAGIVGRADVLACLLFLLAFLSYNRSLDQGCVGGSFPSTVSPFFLLLSLFLGTCAMLVKETGITVFGVCLVYDLFSLSNKQDKSSNGALCPRSPQQPGSPQPSSLPGHPHRENGKQQRFPHKGAWGGCHSPLPPEPKSSGFPVSPRAVWSMMRFLTYSYLLAFNVWLLLAPVTLCYDWQVGSIPLVETIWDMRNLATIFLAVVMALLSLHCLAAFKRLEHKEVLVGLLFLVFPFIPASNLFFRVGFVVAERVLYMPSMGYCILFVHGLSKLCTWLNRCGATTLIVSTVLLLLLFSWKTVKQNEIWLSRESLFRSGVQTLPHNAKVHYNYANFLKDQGRNKEAIYHYRTALKLYPRHASALNNLGTLTRDTAEAKMYYQRALQLHPQHNRALFNLGNLLKSQEKKEEAITLLKDSIKYGPEFADAYSSLASLLAEQERFKEAEEIYQTGIKNCPDSSDLHNNYGVFLVDTGLPEKAVAHYQQAIKLSPSHHVAMVNLGRLYRSLGENSMAEEWYKRALQVAHKAEILSPLGALYYNTGRYEEALQIYQEAAALQPSQRELRLALAQVLAVMGQTKEAEKMTNHIVSEETGCLECYRLLSAIYSKQENHDKALDAIDKALQLKPKDPKVISELFFTKGNQLREQNLLDKAFESYRVAVQLNPDQAQAWMNMGGIQHIKGKYVSARAYYERALQLVPDSKLLKENLAKLDRLEKRLQEVREKDQT

SEQ ID NO: 37373 - protein, 944 aa, Homo sapiens
  REGION 1..944: note = ENSP00000448112
MVVTTSARGGGGDRTPSRRRGCGLAPAGAAALLAGASCLCYGRSLQGEFVHDDVWAIVNNPDVRPGAPLRWGIFTNDFWGKGMAENTSHKSYRPLCVLTFKLNIFLTGMNPFYFHAVNIILHCLVTLVLMYTCDKTVFKNRGLAFVTALLFAVHPIHTEAVAGIVGRADVLACLLFLLAFLSYNRSLDQGCVGGSFPSTVSPFFLLLSLFLGTCAMLVKETGITVFGVCLVYDLFSLSNKQDKSSNGALCPRSPQQPGSPQPSSLPGHPHRENGKQQRFPHKGAWGGCHSPLPPEPKSSGFPVSPRAVWSMMRYLRASSNRNFLLTMRPFLKRAILVLSYVLVILYFRLWIMGGSMPLFSEQDNPASFSPYILTRFLTYSYLLAFNVWLLLAPVTLCYDWQVGSIPLVETIWDMRNLATIFLAVVMALLSLHCLAAFKRLEHKEVLVGLLFLVFPFIPASNLFFRVGFVVAERVLYMPSMGYCILFVHGLSKLCTWLNRCGATTLIVSTVLLLLLFSWKTVKQNEIWLSRESLFRSGVQTLPHNAKVHYNYANFLKDQGRNKEAIYHYRTALKLYPRHASALNNLGTLTRDTAEAKMYYQRALQLHPQHNRALFNLGNLLKSQEKKEEAITLLKDSIKYGPEFADAYSSLASLLAEQERFKEAEEIYQTGIKNCPDSSDLHNNYGVFLVDTGLPEKAVAHYQQAIKLSPSHHVAMVNLGRLYRSLGENSMAEEWYKRALQVAHKAEILSPLGALYYNTGRYEEALQIYQEAAALQPSQRELRLALAQVLAVMGQTKEAEKMTNHIVSEETGCLECYRLLSAIYSKQENHDKALDAIDKALQLKPKDPKVISELFFTKGNQLREQNLLDKAFESYRVAVQLNPDQAQAWMNMGGIQHIKGKYVSARAYYERALQLVPDSKLLKENLAKLDRLEKRLQEVREKDQT

SEQ ID NO: 37374 - protein, 906 aa, Homo sapiens
  REGION 1..906: note = ENSP00000449043
MVVTTSARGGGGDRTPSRRRGCGLAPAGAAALLAGASCLCYGRSLQGEFVHDDVWAIVNNPDVRPGAPLRWGIFTNDFWGKGMAENTSHKSYRPLCVLTFKLNIFLTGMNPFYFHAVNIILHCLVTLVLMYTCDKTVFKNRGLAFVTALLFAVHPIHTEAVAGIVGRADVLACLLFLLAFLSYNRSLDQGCVGGSFPSTVSPFFLLLSLFLGTCAMLVKETGITVFGVCLVYDLFSLSNKQDKSSNGALCPRSPQQPGSPQPSSLPGHPHRENGKQQRFPHKGAWGGCHSPLPPEPKSSGFPVSPRAVWSMMRYLRASSNRNFLLTMRPFLKRAILVLSYVLVILYFRLWIMGGSMPLFSEQDNPASFSPYILTRFLTYSYLLAFNVWLLLAPVTLCYDWQVGSIPLVETIWDMRNLATIFLAVVMALLSLHCLAAFKRLEHKEVLVGLLFLVFPFIPASNLFFRVGFVVAERVLYMPSMGYCILFVHGLSKLCTWLNRCGATTLIVSTVLLLLLFSWKTVKQNEIWLSRESLFRLYPRHASALNNLGTLTRDTAEAKMYYQRALQLHPQHNRALFNLGNLLKSQEKKEEAITLLKDSIKYGPEFADAYSSLASLLAEQERFKEAEEIYQTGIKNCPDSSDLHNNYGVFLVDTGLPEKAVAHYQQAIKLSPSHHVAMVNLGRLYRSLGENSMAEEWYKRALQVAHKAEILSPLGALYYNTGRYEEALQIYQEAAALQPSQRELRLALAQVLAVMGQTKEAEKMTNHIVSEETGCLECYRLLSAIYSKQENHDKALDAIDKALQLKPKDPKVISELFFTKGNQLREQNLLDKAFESYRVAVQLNPDQAQAWMNMGGIQHIKGKYVSARAYYERALQLVPDSKLLKENLAKLDRLEKRLQEVREKDQT

SEQ ID NO: 37375 - protein, 882 aa, Homo sapiens
  REGION 1..882: note = ENSP00000442046
MVVTTSARGGGGDRTPSRRRGCGLAPAGAAALLAGASCLCYGRSLQGEFVHDDVWAIVNNPDVRPGAPLRWGIFTNDFWGKGMAENTSHKSYRPLCVLTFKLNIFLTGMNPFYFHAVNIILHCLVTLVLMYTCDKTVFKNRGLAFVTALLFAVHPIHTEAVAGIVGRADVLACLLFLLAFLSYNRSLDQGCVGGSFPSTVSPFFLLLSLFLGTCAMLVKETGITVFGVCLVYDLFSLSNKQDKSSNGALCPRSPQQPGSPQPSSLPGHPHRENGKQQRFPHKGAWGGCHSPLPPEPKSSGFPVSPRAVWSMMRFLTYSYLLAFNVWLLLAPVTLCYDWQVGSIPLVETIWDMRNLATIFLAVVMALLSLHCLAAFKRLEHKEVLVGLLFLVFPFIPASNLFFRVGFVVAERVLYMPSMGYCILFVHGLSKLCTWLNRCGATTLIVSTVLLLLLFSWKTVKQNEIWLSRESLFRSGVQTLPHNAKVHYNYANFLKDQGRNKEAIYHYRTALKLYPRHASALNNLGTLTRDTAEAKMYYQRALQLHPQHNRALFNLGNLLKSQEKKEEAITLLKDSIKYGPEFADAYSSLASLLAEQERFKEAEEIYQTGIKNCPDSSDLHNNYGVFLVDTGLPEKAVAHYQQAIKLSPSHHVAMVNLGRLYRSLGENSMAEEWYKRALQVAHKAEILSPLGALYYNTGRYEEALQIYQEAAALQPSQRELRLALAQVLAVMGQTKEAEKMTNHIVSEETGCLECYRLLSAIYSKQENHDKALDAIDKALQLKPKDPKVISELFFTKGNQLREQNLLDKAFESYRVAVQLNPDQAQAWMNMGGIQHIKGKYVSARAYYERALQLVPDSKLLKENLAKLDRLEKRLQEVREKDQT

SEQ ID NO: 37376 - protein, 130 aa, Homo sapiens
  REGION 1..130: note = ENSP00000449054
FRVGFVVAERVLYMPSMGYCILFVHGLSKLCTWLNRCGATTLIVSTVLLLLLFSWKTVKQNEIWLSRESLFRSGVQTLPHNAKVHYNYANFLKDQGRNKEAIYHYRTALNNNKAWDYLCWRFRKTLTDLP

SEQ ID NO: 37377 - protein, 741 aa, Homo sapiens
  REGION 1..741: note = ENSP00000365408
MAVLDTDLDHILPSSVLPPFWAKLVVGSVAIVCFARSYDGDFVFDDSEAIVNNKDLQAETPLGDLWHHDFWGSRLSSNTSHKSYRPLTVLTFRINYYLSGGFHPVGFHVVNILLHSGISVLMVDVFSVLFGGLQYTSKGRRLHLAPRASLLAALLFAVHPVHTECVAGVVGRADLLCALFFLLSFLGYCKAFRESNKEGAHSSTFWVLLSIFLGAVAMLCKEQGITVLGLNAVFDILVIGKFNVLEIVQKVLHKDKSLENLGMLRNGGLLFRMTLLTSGGAGMLYVRWRIMGTGPPAFTEVDNPASFADSMLVRAVNYNYYYSLNAWLLLCPWWLCFDWSMGCIPLIKSISDWRVIALAALWFCLIGLICQALCSEDGHKRRILTLGLGFLVIPFLPASNLFFRVGFVVAERVLYLPSVGYCVLLTFGFGALSKHTKKKKLIAAVVLGILFINTLRCVLRSGEWRSEEQLFRSALSVCPLNAKVHYNIGKNLADKGNQTAAIRYYREAVRLNPKYVHAMNNLGNILKERNELQEAEELLSLAVQIQPDFAAAWMNLGIVQNSLKRFEAAEQSYRTAIKHRRKYPDCYYNLGRLYADLNRHVDALNAWRNATVLKPEHSLAWNNMIILLDNTGNLAQAEAVGREALELIPNDHSLMFSLANVLGKSQKYKESEALFLKAIKANPNAASYHGNLAVLYHRWGHLDLAKKHYEISLQLDPTASGTKENYGLLRRKLELMQKKAV

SEQ ID NO: 37378 - protein, 760 aa, Homo sapiens
  REGION 1..760: note = ENSP00000343871
MIPNQHNAGAGSHQPAVFRMAVLDTDLDHILPSSVLPPFWAKLVVGSVAIVCFARSYDGDFVFDDSEAIVNNKDLQAETPLGDLWHHDFWGSRLSSNTSHKSYRPLTVLTFRINYYLSGGFHPVGFHVVNILLHSGISVLMVDVFSVLFGGLQYTSKGRRLHLAPRASLLAALLFAVHPVHTECVAGVVGRADLLCALFFLLSFLGYCKAFRESNKEGAHSSTFWVLLSIFLGAVAMLCKEQGITVLGLNAVFDILVIGKFNVLEIVQKVLHKDKSLENLGMLRNGGLLFRMTLLTSGGAGMLYVRWRIMGTGPPAFTEVDNPASFADSMLVRAVNYNYYYSLNAWLLLCPWWLCFDWSMGCIPLIKSISDWRVIALAALWFCLIGLICQALCSEDGHKRRILTLGLGFLVIPFLPASNLFFRVGFVVAERVLYLPSVGYCVLLTFGFGALSKHTKKKKLIAAVVLGILFINTLRCVLRSGEWRSEEQLFRSALSVCPLNAKVHYNIGKNLADKGNQTAAIRYYREAVRLNPKYVHAMNNLGNILKERNELQEAEELLSLAVQIQPDFAAAWMNLGIVQNSLKRFEAAEQSYRTAIKHRRKYPDCYYNLGRLYADLNRHVDALNAWRNATVLKPEHSLAWNNMIILLDNTGNLAQAEAVGREALELIPNDHSLMFSLANVLGKSQKYKESEALFLKAIKANPNAASYHGNLAVLYHRWGHLDLAKKHYEISLQLDPTASGTKENYGLLRRKLELMQKKAV

SEQ ID NO: 37379 - protein, 630 aa, Homo sapiens
  REGION 1..630: note = ENSP00000365409
MAVLDTDLDHILPSSVLPPFWAKLVVGSVAIVCFARSYDGDFVFDDSEAIVNNKVAGVVGRADLLCALFFLLSFLGYCKAFRESNKEGAHSSTFWVLLSIFLGAVAMLCKEQGITVLGLNAVFDILVIGKFNVLEIVQKVLHKDKSLENLGMLRNGGLLFRMTLLTSGGAGMLYVRWRIMGTGPPAFTEVDNPASFADSMLVRAVNYNYYYSLNAWLLLCPWWLCFDWSMGCIPLIKSISDWRVIALAALWFCLIGLICQALCSEDGHKRRILTLGLGFLVIPFLPASNLFFRVGFVVAERVLYLPSVGYCVLLTFGFGALSKHTKKKKLIAAVVLGILFINTLRCVLRSGEWRSEEQLFRSALSVCPLNAKVHYNIGKNLADKGNQTAAIRYYREAVRLNPKYVHAMNNLGNILKERNELQEAEELLSLAVQIQPDFAAAWMNLGIVQNSLKRFEAAEQSYRTAIKHRRKYPDCYYNLGRLYADLNRHVDALNAWRNATVLKPEHSLAWNNMIILLDNTGNLAQAEAVGREALELIPNDHSLMFSLANVLGKSQKYKESEALFLKAIKANPNAASYHGNLAVLYHRWGHLDLAKKHYEISLQLDPTASGTKENYGLLRRKLELMQKKAV

SEQ ID NO: 37380 - protein, 114 aa, Homo sapiens
  REGION 1..114: note = ENSP00000393600
MAVLDTDLDHILPSSVLPPFWAKLVVGSVAIVCFARSYDGDFVFDDSEAIVNNKHTLLWRLHLIKYLEPRWCSFPVQREEKILCRSPSQLTGYFCKSVEEGPPSRNAPGGPVAS

SEQ ID NO: 37381 - protein, 54 aa, Homo sapiens
  REGION 1..54: note = ENSP00000398400
MAVLDTDLDHILPSSVLPPFWAKLVVGSVAIVCFARSYDGDFVFDDSEAIVNNK

SEQ ID NO: 37382 - protein, 73 aa, Homo sapiens
  REGION 1..73: note = ENSP00000419613
MIPNQHNAGAGSHQPAVFRMAVLDTDLDHILPSSVLPPFWAKLVVGSVAIVCFARSYDGDFVFDDSEAIVNNK

SEQ ID NO: 37383 - protein, 1928 aa, Homo sapiens
  REGION 1..1928: note = ENSP00000411406
MGAMTQLLAGVFLAFLALATEGGVLKKVIRHKRQSGVNATLPEENQPVVFNHVYNIKLPVGSQCSVDLESASGEKDLAPPSEPSESFQEHTVDGENQIVFTHRINIPRRACGCAAAPDVKELLSRLEELENLVSSLREQCTAGAGCCLQPATGRLDTRPFCSGRGNFSTEGCGCVCEPGWKGPNCSEPECPGNCHLRGRCIDGQCICDDGFTGEDCSQLACPSDCNDQGKCVNGVCICFEGYAGADCSREICPVPCSEEHGTCVDGLCVCHDGFAGDDCNKPLCLNNCYNRGRCVENECVCDEGFTGEDCSELICPNDCFDRGRCINGTCYCEEGFTGEDCGKPTCPHACHTQGRCEEGQCVCDEGFAGVDCSEKRCPADCHNRGRCVDGRCECDDGFTGADCGELKCPNGCSGHGRCVNGQCVCDEGYTGEDCSQLRCPNDCHSRGRCVEGKCVCEQGFKGYDCSDMSCPNDCHQHGRCVNGMCVCDDGYTGEDCRDRQCPRDCSNRGLCVDGQCVCEDGFTGPDCAELSCPNDCHGQGRCVNGQCVCHEGFMGKDCKEQRCPSDCHGQGRCVDGQCICHEGFTGLDCGQHSCPSDCNNLGQCVSGRCICNEGYSGEDCSEVSPPKDLVVTEVTEETVNLAWDNEMRVTEYLVVYTPTHEGGLEMQFRVPGDQTSTIIQELEPGVEYFIRVFAILENKKSIPVSARVATYLPAPEGLKFKSIKETSVEVEWDPLDIAFETWEIIFRNMNKEDEGEITKSLRRPETSYRQTGLAPGQEYEISLHIVKNNTRGPGLKRVTTTRLDAPSQIEVKDVTDTTALITWFKPLAEIDGIELTYGIKDVPGDRTTIDLTEDENQYSIGNLKPDTEYEVSLISRRGDMSSNPAKETFTTGLDAPRNLRRVSQTDNSITLEWRNGKAAIDSYRIKYAPISGGDHAEVDVPKSQQATTKTTLTGLRPGTEYGIGVSAVKEDKESNPATINAATELDTPKDLQVSETAETSLTLLWKTPLAKFDRYRLNYSLPTGQWVGVQLPRNTTSYVLRGLEPGQEYNVLLTAEKGRHKSKPARVKASTEQAPELENLTVTEVGWDGLRLNWTAADQAYEHFIIQVQEANKVEAARNLTVPGSLRAVDIPGLKAATPYTVSIYGVIQGYRTPVLSAEASTGETPNLGEVVVAEVGWDALKLNWTAPEGAYEYFFIQVQEADTVEAAQNLTVPGGLRSTDLPGLKAATHYTITIRGVTQDFSTTPLSVEVLTEEVPDMGNLTVTEVSWDALRLNWTTPDGTYDQFTIQVQEADQVEEAHNLTVPGSLRSMEIPGLRAGTPYTVTLHGEVRGHSTRPLAVEVVTEDLPQLGDLAVSEVGWDGLRLNWTAADNAYEHFVIQVQEVNKVEAAQNLTLPGSLRAVDIPGLEAATPYRVSIYGVIRGYRTPVLSAEASTAMGSPKEVIFSDITENSATVSWRAPTAQVESFRITYVPITGGTPSMVTVDGTKTQTRLVKLIPGVEYLVSIIAMKGFEESEPVSGSFTTALDGPSGLVTANITDSEALARWQPAIATVDSYVISYTGEKVPEITRTVSGNTVEYALTDLEPATEYTLRIFAEKGPQKSSTITAKFTTDLDSPRDLTATEVQSETALLTWRPPRASVTGYLLVYESVDGTVKEVIVGPDTTSYSLADLSPSTHYTAKIQALNGPLRSNMIQTIFTTIGLLYPFPKDCSQAMLNGDTTSGLYTIYLNGDKAEALEVFCDMTSDGGGWIVFLRRKNGRENFYQNWKAYAAGFGDRREEFWLGLDNLNKITAQGQYELRVDLRDHGETAFAVYDKFSVGDAKTRYKLKVEGYSGTAGDSMAYHNGRSFSTFDKDTDSAITNCALSYKGAFWYRNCHRVNLMGRYGDNNHSQGVNWFHWKGHEHSIQFAEMKLRPSNFRNLEGRRKRA

SEQ ID NO: 37384 - protein, 2201 aa, Homo sapiens
  REGION 1..2201: note = ENSP00000265131
MGAMTQLLAGVFLAFLALATEGGVLKKVIRHKRQSGVNATLPEENQPVVFNHVYNIKLPVGSQCSVDLESASGEKDLAPPSEPSESFQEHTVDGENQIVFTHRINIPRRACGCAAAPDVKELLSRLEELENLVSSLREQCTAGAGCCLQPATGRLDTRPFCSGRGNFSTEGCGCVCEPGWKGPNCSEPECPGNCHLRGRCIDGQCICDDGFTGEDCSQLACPSDCNDQGKCVNGVCICFEGYAGADCSREICPVPCSEEHGTCVDGLCVCHDGFAGDDCNKPLCLNNCYNRGRCVENECVCDEGFTGEDCSELICPNDCFDRGRCINGTCYCEEGFTGEDCGKPTCPHACHTQGRCEEGQCVCDEGFAGVDCSEKRCPADCHNRGRCVDGRCECDDGFTGADCGELKCPNGCSGHGRCVNGQCVCDEGYTGEDCSQLRCPNDCHSRGRCVEGKCVCEQGFKGYDCSDMSCPNDCHQHGRCVNGMCVCDDGYTGEDCRDRQCPRDCSNRGLCVDGQCVCEDGFTGPDCAELSCPNDCHGQGRCVNGQCVCHEGFMGKDCKEQRCPSDCHGQGRCVDGQCICHEGFTGLDCGQHSCPSDCNNLGQCVSGRCICNEGYSGEDCSEVSPPKDLVVTEVTEETVNLAWDNEMRVTEYLVVYTPTHEGGLEMQFRVPGDQTSTIIQELEPGVEYFIRVFAILENKKSIPVSARVATYLPAPEGLKFKSIKETSVEVEWDPLDIAFETWEIIFRNMNKEDEGEITKSLRRPETSYRQTGLAPGQEYEISLHIVKNNTRGPGLKRVTTTRLDAPSQIEVKDVTDTTALITWFKPLAEIDGIELTYGIKDVPGDRTTIDLTEDENQYSIGNLKPDTEYEVSLISRRGDMSSNPAKETFTTGLDAPRNLRRVSQTDNSITLEWRNGKAAIDSYRIKYAPISGGDHAEVDVPKSQQATTKTTLTGLRPGTEYGIGVSAVKEDKESNPATINAATELDTPKDLQVSETAETSLTLLWKTPLAKFDRYRLNYSLPTGQWVGVQLPRNTTSYVLRGLEPGQEYNVLLTAEKGRHKSKPARVKASTEQAPELENLTVTEVGWDGLRLNWTAADQAYEHFIIQVQEANKVEAARNLTVPGSLRAVDIPGLKAATPYTVSIYGVIQGYRTPVLSAEASTGETPNLGEVVVAEVGWDALKLNWTAPEGAYEYFFIQVQEADTVEAAQNLTVPGGLRSTDLPGLKAATHYTITIRGVTQDFSTTPLSVEVLTEEVPDMGNLTVTEVSWDALRLNWTTPDGTYDQFTIQVQEADQVEEAHNLTVPGSLRSMEIPGLRAGTPYTVTLHGEVRGHSTRPLAVEVVTEDLPQLGDLAVSEVGWDGLRLNWTAADNAYEHFVIQVQEVNKVEAAQNLTLPGSLRAVDIPGLEAATPYRVSIYGVIRGYRTPVLSAEASTAKEPEIGNLNVSDITPESFNLSWMATDGIFETFTIEIIDSNRLLETVEYNISGAERTAHISGLPPSTDFIVYLSGLAPSIRTKTISATATTEALPLLENLTISDINPYGFTVSWMASENAFDSFLVTVVDSGKLLDPQEFTLSGTQRKLELRGLITGIGYEVMVSGFTQGHQTKPLRAEIVTEAEPEVDNLLVSDATPDGFRLSWTADEGVFDNFVLKIRDTKKQSEPLEITLLAPERTRDITGLREATEYEIELYGISKGRRSQTVSAIATTAMGSPKEVIFSDITENSATVSWRAPTAQVESFRITYVPITGGTPSMVTVDGTKTQTRLVKLIPGVEYLVSIIAMKGFEESEPVSGSFTTALDGPSGLVTANITDSEALARWQPAIATVDSYVISYTGEKVPEITRTVSGNTVEYALTDLEPATEYTLRIFAEKGPQKSSTITAKFTTDLDSPRDLTATEVQSETALLTWRPPRASVTGYLLVYESVDGTVKEVIVGPDTTSYSLADLSPSTHYTAKIQALNGPLRSNMIQTIFTTIGLLYPFPKDCSQAMLNGDTTSGLYTIYLNGDKAEALEVFCDMTSDGGGWIVFLRRKNGRENFYQNWKAYAAGFGDRREEFWLGLDNLNKITAQGQYELRVDLRDHGETAFAVYDKFSVGDAKTRYKLKVEGYSGTAGDSMAYHNGRSFSTFDKDTDSAITNCALSYKGAFWYRNCHRVNLMGRYGDNNHSQGVNWFHWKGHEHSIQFAEMKLRPSNFRNLEGRRKRA

SEQ ID NO: 37385 - protein, 1838 aa, Homo sapiens
  REGION 1..1838: note = ENSP00000438152
MGAMTQLLAGVFLAFLALATEGGVLKKVIRHKRQSGVNATLPEENQPVVFNHVYNIKLPVGSQCSVDLESASGEKDLAPPSEPSESFQEHTVDGENQIVFTHRINIPRRACGCAAAPDVKELLSRLEELENLVSSLREQCTAGAGCCLQPATGRLDTRPFCSGRGNFSTEGCGCVCEPGWKGPNCSEPECPGNCHLRGRCIDGQCICDDGFTGEDCSQLACPSDCNDQGKCVNGVCICFEGYAGADCSREICPVPCSEEHGTCVDGLCVCHDGFAGDDCNKPLCLNNCYNRGRCVENECVCDEGFTGEDCSELICPNDCFDRGRCINGTCYCEEGFTGEDCGKPTCPHACHTQGRCEEGQCVCDEGFAGVDCSEKRCPADCHNRGRCVDGRCECDDGFTGADCGELKCPNGCSGHGRCVNGQCVCDEGYTGEDCSQLRCPNDCHSRGRCVEGKCVCEQGFKGYDCSDMSCPNDCHQHGRCVNGMCVCDDGYTGEDCRDRQCPRDCSNRGLCVDGQCVCEDGFTGPDCAELSCPNDCHGQGRCVNGQCVCHEGFMGKDCKEQRCPSDCHGQGRCVDGQCICHEGFTGLDCGQHSCPSDCNNLGQCVSGRCICNEGYSGEDCSEVSPPKDLVVTEVTEETVNLAWDNEMRVTEYLVVYTPTHEGGLEMQFRVPGDQTSTIIQELEPGVEYFIRVFAILENKKSIPVSARVATYLPAPEGLKFKSIKETSVEVEWDPLDIAFETWEIIFRNMNKEDEGEITKSLRRPETSYRQTGLAPGQEYEISLHIVKNNTRGPGLKRVTTTRLDAPSQIEVKDVTDTTALITWFKPLAEIDGIELTYGIKDVPGDRTTIDLTEDENQYSIGNLKPDTEYEVSLISRRGDMSSNPAKETFTTGLDAPRNLRRVSQTDNSITLEWRNGKAAIDSYRIKYAPISGGDHAEVDVPKSQQATTKTTLTGLRPGTEYGIGVSAVKEDKESNPATINAATELDTPKDLQVSETAETSLTLLWKTPLAKFDRYRLNYSLPTGQWVGVQLPRNTTSYVLRGLEPGQEYNVLLTAEKGRHKSKPARVKASTAKEPEIGNLNVSDITPESFNLSWMATDGIFETFTIEIIDSNRLLETVEYNISGAERTAHISGLPPSTDFIVYLSGLAPSIRTKTISATATTEPKPQLGTLIFSNITPKSFNMSWTTQAGLFAKIVINVSDAHSLHESQQFTVSGDAKQAHITGLVENTGYDVSVAGTTLAGDPTRPLTAFVITEAEPEVDNLLVSDATPDGFRLSWTADEGVFDNFVLKIRDTKKQSEPLEITLLAPERTRDITGLREATEYEIELYGISKGRRSQTVSAIATTAMGSPKEVIFSDITENSATVSWRAPTAQVESFRITYVPITGGTPSMVTVDGTKTQTRLVKLIPGVEYLVSIIAMKGFEESEPVSGSFTTALDGPSGLVTANITDSEALARWQPAIATVDSYVISYTGEKVPEITRTVSGNTVEYALTDLEPATEYTLRIFAEKGPQKSSTITAKFTTDLDSPRDLTATEVQSETALLTWRPPRASVTGYLLVYESVDGTVKEVIVGPDTTSYSLADLSPSTHYTAKIQALNGPLRSNMIQTIFTTIGLLYPFPKDCSQAMLNGDTTSGLYTIYLNGDKAEALEVFCDMTSDGGGWIVFLRRKNGRENFYQNWKAYAAGFGDRREEFWLGLDNLNKITAQGQYELRVDLRDHGETAFAVYDKFSVGDAKTRYKLKVEGYSGTAGDSMAYHNGRSFSTFDKDTDSAITNCALSYKGAFWYRNCHRVNLMGRYGDNNHSQGVNWFHWKGHEHSIQFAEMKLRPSNFRNLEGRRKRA

SEQ ID NO: 37386 - protein, 92 aa, Homo sapiens
  REGION 1..92: note = ENSP00000443469
MGAMTQLLAGVFLAFLALATEGGVLKKVIRHKRQSGVNATLPEENQPVVFNHVYNIKLPVGSQCSVDLESASGEKDLAPPSEPSESFQEHTV

SEQ ID NO: 37387 - protein, 23 aa, Homo sapiens
  REGION 1..23: note = ENSP00000489385
ASTEAEPEVDNLLVSDATPDGFR

SEQ ID NO: 37388 - protein, 615 aa, Homo sapiens
  REGION 1..615: note = ENSP00000445380
  VARIANT 1: note = Any amino acid
XPELENLTVTEVGWDGLRLNWTAADQAYEHFIIQVQEANKVEAARNLTVPGSLRAVDIPGLKAATPYTVSIYGVIQGYRTPVLSAEASTAKEPEIGNLNVSDITPESFNLSWMATDGIFETFTIEIIDSNRLLETVEYNISGAERTAHISGLPPSTDFIVYLSGLAPSIRTKTISATATTEAEPEVDNLLVSDATPDGFRLSWTADEGVFDNFVLKIRDTKKQSEPLEITLLAPERTRDITGLREATEYEIELYGISKGRRSQTVSAIATTAMGSPKEVIFSDITENSATVSWRAPTAQVESFRITYVPITGGTPSMVTVDGTKTQTRLVKLIPGVEYLVSIIAMKGFEESEPVSGSFTTALDGPSGLVTANITDSEALARWQPAIATVDSYVISYTGEKVPEITRTVSGNTVEYALTDLEPATEYTLRIFAEKGPQKSSTITAKFTTDLDSPRDLTATEVQSETALLTWRPPRASVTGYLLVYESVDGTVKEVIVGPDTTSYSLADLSPSTHYTAKIQALNGPLRSNMIQTIFTTIGLLYPFPKDCSQAMLNGDTTSGLYTIYLNGDKAEALEVFCDMTSDGGGWIVFLRRKNGRENFYQNWKAYAAGFGDRRE

SEQ ID NO: 37389 - protein, 1838 aa, Homo sapiens; identical to SEQ ID NO: 37385
  REGION 1..1838: note = ENSP00000442242

SEQ ID NO: 37390 - protein, 1564 aa, Homo sapiens
  REGION 1..1564: note = ENSP00000443478
MGAMTQLLAGVFLAFLALATEGGVLKKVIRHKRQSGVNATLPEENQPVVFNHVYNIKLPVGSQCSVDLESASGEKDLAPPSEPSESFQEHTVDGENQIVFTHRINIPRRACGCAAAPDVKELLSRLEELENLVSSLREQCTAGAGCCLQPATGRLDTRPFCSGRGNFSTEGCGCVCEPGWKGPNCSEPECPGNCHLRGRCIDGQCICDDGFTGEDCSQLACPSDCNDQGKCVNGVCICFEGYAGADCSREICPVPCSEEHGTCVDGLCVCHDGFAGDDCNKPLCLNNCYNRGRCVENECVCDEGFTGEDCSELICPNDCFDRGRCINGTCYCEEGFTGEDCGKPTCPHACHTQGRCEEGQCVCDEGFAGVDCSEKRCPADCHNRGRCVDGRCECDDGFTGADCGELKCPNGCSGHGRCVNGQCVCDEGYTGEDCSQLRCPNDCHSRGRCVEGKCVCEQGFKGYDCSDMSCPNDCHQHGRCVNGMCVCDDGYTGEDCRDRQCPRDCSNRGLCVDGQCVCEDGFTGPDCAELSCPNDCHGQGRCVNGQCVCHEGFMGKDCKEQRCPSDCHGQGRCVDGQCICHEGFTGLDCGQHSCPSDCNNLGQCVSGRCICNEGYSGEDCSEVSPPKDLVVTEVTEETVNLAWDNEMRVTEYLVVYTPTHEGGLEMQFRVPGDQTSTIIQELEPGVEYFIRVFAILENKKSIPVSARVATYLPAPEGLKFKSIKETSVEVEWDPLDIAFETWEIIFRNMNKEDEGEITKSLRRPETSYRQTGLAPGQEYEISLHIVKNNTRGPGLKRVTTTRLDAPSQIEVKDVTDTTALITWFKPLAEIDGIELTYGIKDVPGDRTTIDLTEDENQYSIGNLKPDTEYEVSLISRRGDMSSNPAKETFTTGLDAPRNLRRVSQTDNSITLEWRNGKAAIDSYRIKYAPISGGDHAEVDVPKSQQATTKTTLTGLRPGTEYGIGVSAVKEDKESNPATINAATELDTPKDLQVSETAETSLTLLWKTPLAKFDRYRLNYSLPTGQWVGVQLPRNTTSYVLRGLEPGQEYNVLLTAEKGRHKSKPARVKASTAMGSPKEVIFSDITENSATVSWRAPTAQVESFRITYVPITGGTPSMVTVDGTKTQTRLVKLIPGVEYLVSIIAMKGFEESEPVSGSFTTALDGPSGLVTANITDSEALARWQPAIATVDSYVISYTGEKVPEITRTVSGNTVEYALTDLEPATEYTLRIFAEKGPQKSSTITAKFTTDLDSPRDLTATEVQSETALLTWRPPRASVTGYLLVYESVDGTVKEVIVGPDTTSYSLADLSPSTHYTAKIQALNGPLRSNMIQTIFTTIGLLYPFPKDCSQAMLNGDTTSGLYTIYLNGDKAEALEVFCDMTSDGGGWIVFLRRKNGRENFYQNWKAYAAGFGDRREEFWLGLDNLNKITAQGQYELRVDLRDHGETAFAVYDKFSVGDAKTRYKLKVEGYSGTAGDSMAYHNGRSFSTFDKDTDSAITNCALSYKGAFWYRNCHRVNLMGRYGDNNHSQGVNWFHWKGHEHSIQFAEMKLRPSNFRNLEGRRKRA

SEQ ID NO: 37391 - protein, 2019 aa, Homo sapiens
  REGION 1..2019: note = ENSP00000339553
MGAMTQLLAGVFLAFLALATEGGVLKKVIRHKRQSGVNATLPEENQPVVFNHVYNIKLPVGSQCSVDLESASGEKDLAPPSEPSESFQEHTVDGENQIVFTHRINIPRRACGCAAAPDVKELLSRLEELENLVSSLREQCTAGAGCCLQPATGRLDTRPFCSGRGNFSTEGCGCVCEPGWKGPNCSEPECPGNCHLRGRCIDGQCICDDGFTGEDCSQLACPSDCNDQGKCVNGVCICFEGYAGADCSREICPVPCSEEHGTCVDGLCVCHDGFAGDDCNKPLCLNNCYNRGRCVENECVCDEGFTGEDCSELICPNDCFDRGRCINGTCYCEEGFTGEDCGKPTCPHACHTQGRCEEGQCVCDEGFAGVDCSEKRCPADCHNRGRCVDGRCECDDGFTGADCGELKCPNGCSGHGRCVNGQCVCDEGYTGEDCSQLRCPNDCHSRGRCVEGKCVCEQGFKGYDCSDMSCPNDCHQHGRCVNGMCVCDDGYTGEDCRDRQCPRDCSNRGLCVDGQCVCEDGFTGPDCAELSCPNDCHGQGRCVNGQCVCHEGFMGKDCKEQRCPSDCHGQGRCVDGQCICHEGFTGLDCGQHSCPSDCNNLGQCVSGRCICNEGYSGEDCSEVSPPKDLVVTEVTEETVNLAWDNEMRVTEYLVVYTPTHEGGLEMQFRVPGDQTSTIIQELEPGVEYFIRVFAILENKKSIPVSARVATYLPAPEGLKFKSIKETSVEVEWDPLDIAFETWEIIFRNMNKEDEGEITKSLRRPETSYRQTGLAPGQEYEISLHIVKNNTRGPGLKRVTTTRLDAPSQIEVKDVTDTTALITWFKPLAEIDGIELTYGIKDVPGDRTTIDLTEDENQYSIGNLKPDTEYEVSLISRRGDMSSNPAKETFTTGLDAPRNLRRVSQTDNSITLEWRNGKAAIDSYRIKYAPISGGDHAEVDVPKSQQATTKTTLTGLRPGTEYGIGVSAVKEDKESNPATINAATELDTPKDLQVSETAETSLTLLWKTPLAKFDRYRLNYSLPTGQWVGVQLPRNTTSYVLRGLEPGQEYNVLLTAEKGRHKSKPARVKASTEQAPELENLTVTEVGWDGLRLNWTAADQAYEHFIIQVQEANKVEAARNLTVPGSLRAVDIPGLKAATPYTVSIYGVIQGYRTPVLSAEASTGETPNLGEVVVAEVGWDALKLNWTAPEGAYEYFFIQVQEADTVEAAQNLTVPGGLRSTDLPGLKAATHYTITIRGVTQDFSTTPLSVEVLTEDLPQLGDLAVSEVGWDGLRLNWTAADNAYEHFVIQVQEVNKVEAAQNLTLPGSLRAVDIPGLEAATPYRVSIYGVIRGYRTPVLSAEASTAKEPEIGNLNVSDITPESFNLSWMATDGIFETFTIEIIDSNRLLETVEYNISGAERTAHISGLPPSTDFIVYLSGLAPSIRTKTISATATTEAEPEVDNLLVSDATPDGFRLSWTADEGVFDNFVLKIRDTKKQSEPLEITLLAPERTRDITGLREATEYEIELYGISKGRRSQTVSAIATTAMGSPKEVIFSDITENSATVSWRAPTAQVESFRITYVPITGGTPSMVTVDGTKTQTRLVKLIPGVEYLVSIIAMKGFEESEPVSGSFTTALDGPSGLVTANITDSEALARWQPAIATVDSYVISYTGEKVPEITRTVSGNTVEYALTDLEPATEYTLRIFAEKGPQKSSTITAKFTTDLDSPRDLTATEVQSETALLTWRPPRASVTGYLLVYESVDGTVKEVIVGPDTTSYSLADLSPSTHYTAKIQALNGPLRSNMIQTIFTTIGLLYPFPKDCSQAMLNGDTTSGLYTIYLNGDKAEALEVFCDMTSDGGGWIVFLRRKNGRENFYQNWKAYAAGFGDRREEFWLGLDNLNKITAQGQYELRVDLRDHGETAFAVYDKFSVGDAKTRYKLKVEGYSGTAGDSMAYHNGRSFSTFDKDTDSAITNCALSYKGAFWYRNCHRVNLMGRYGDNNHSQGVNWFHWKGHEHSIQFAEMKLRPSNFRNLEGRRKRA

SEQ ID NO: 37392 - protein, 277 aa, Homo sapiens
  REGION 1..277: note = ENSP00000243347
MIILIYLFLLLWEDTQGWGFKDGIFHNSIWLERAAGVYHREARSGKYKLTYAEAKAVCEFEGGHLATYKQLEAARKIGFHVCAAGWMAKGRVGYPIVKPGPNCGFGKTGIIDYGIRLNRSERWDAYCYNPHAKECGGVFTDPKQIFKSPGFPNEYEDNQICYWHIRLKYGQRIHLSFLDFDLEDDPGCLADYVEIYDSYDDVHGFVGRYCGDELPDDIISTGNVMTLKFLSDASVTAGGFQIKYVAMDPVSKSSQGKNTSTTSTGNKNFLAGRFSHL

SEQ ID NO: 37393 - protein, 184 aa, Homo sapiens
  REGION 1..184: note = ENSP00000291232
MRRGPRSLRGRDAPAPTPCVPAECFDLLVRHCVACGLLRTPRPKPAGASSPAPRTALQPQESVGAGAGEAALPLPGLLFGAPALLGLALVLALVLVGLVSWRRRQRRLRGASSAEAPDGDKDAPEPLDKVIILSPGISDATAPAWPPPGEDPGTTPPGHSVPVPATELGSTELVTTKTAGPEQQ

SEQ ID NO: 37394 - protein, 417 aa, Homo sapiens
  REGION 1..417: note = ENSP00000248484
MALKVLLEQEKTFFTLLVLLGYLSCKVTCESGDCRQQEFRDRSGNCVPCNQCGPGMELSKECGFGYGEDAQCVTCRLHRFKEDWGFQKCKPCLDCAVVNRFQKANCSATSDAICGDCLPGFYRKTKLVGFQDMECVPCGDPPPPYEPHCASKVNLVKIASTASSPRDTALAAVICSALATVLLALLILCVIYCKRQFMEKKPSWSLRSQDIQYNGSELSCFDRPQLHEYAHRACCQCRRDSVQTCGPVRLLPSMCCEEACSPNPATLGCGVHSAASLQARNAGPAGEMVPTFFGSLTQSICGEFSDAWPLMQNPMGGDNISFCDSYPELTGEDIHSLNPELESSTSLDSNSSQDLVGGAVPVQSHSENFTAATDLSRYNNTLVESASTQDALTMRSQLDQESGAVIHPATQTSLQEA

SEQ ID NO: 37395 - protein, 423 aa, Homo sapiens
  REGION 1..423: note = ENSP00000371693
MALKVLLEQEKTFFTLLVLLGYLSCKVTCESGDCRQQEFRDRSGNCVPCNQCGPGMELSKECGFGYGEDAQCVTCRLHRFKEDWGFQKCKPCLDCAVVNRFQKANCSATSDAICGDCLPGFYRKTKLVGFQDMECVPCGDPPPPYEPHCASKVNLVKIASTASSPRDTALAAVICSALATVLLALLILCVIYCKRQFMEKKPSWSLRSQDIQYNGSELSCFDRPQLHEYAHRACCQCRRDSVQTCGPVRLLPSMCCEEACSPNPATLGCGVHSAASLQARNAGPAGEMVPTFFGSLTQSICGEFSDAWPLMQNPMGGDNISFCDSYPELTGEDIHSLNPELESSTSLDSNSSQDLVGGAVPVQSHSENFTAATDLSRYNNTLVESASTQDALTMRSQLDQESGAVIHPATQTSLQVRQRLGSL

SEQ ID NO: 37396 - protein, 417 aa, Homo sapiens; identical to SEQ ID NO: 37394
  REGION 1..417: note = ENSP00000371698

SEQ ID NO: 37397 - protein, 285 aa, Homo sapiens
  REGION 1..285: note = ENSP00000385408
MECVPCGDPPPPYEPHCASKVNLVKIASTASSPRDTALAAVICSALATVLLALLILCVIYCKRQFMEKKPSWSLRSQDIQYNGSELSCFDRPQLHEYAHRACCQCRRDSVQTCGPVRLLPSMCCEEACSPNPATLGCGVHSAASLQARNAGPAGEMVPTFFGSLTQSICGEFSDAWPLMQNPMGGDNISFCDSYPELTGEDIHSLNPELESSTSLDSNSSQDLVGGAVPVQSHSENFTAATDLSRYNNTLVESASTQDALTMRSQLDQESGAVIHPATQTSLQEA

SEQ ID NO: 37398 - protein, 254 aa, Homo sapiens
  REGION 1..254: note = ENSP00000245817
MEYASDASLDPEAPWPPAPRARACRVLPWALVAGLLLLLLLAAACAVFLACPWAVSGARASPGSAASPRLREGPELSPDDPAGLLDLRQGMFAQLVAQNVLLIDGPLSWYSDPGLAGVSLTGGLSYKEDTKELVVAKAGVYYVFFQLELRRVVAGEGSGSVSLALHLQPLRSAAGAAALALTVDLPPASSEARNSAFGFQGRLLHLSAGQRLGVHLHTEARARHAWQLTQGATVLGLFRVTPEIPAGLPSPRSE

SEQ ID NO: 37399 - protein, 607 aa, Homo sapiens
  REGION 1..607: note = ENSP00000398614
LSAQDISQPLQNSFIHTGHGDSDPRHCWGFPDRIDELYLGNPMDPPDLLSVELSTSRPPQHLGGVKREPPPRPPQPAFFTQKPTYDPVSEDQDPLSSDFKRLGLRKPGLPRGLWLAKPSARVPGTKASRGSGAEVTLIDFGEEPVVPALRPCAPSLAQLAMDACSLLDETPPQSPTRALPRPLHPTPVVDWDARPLPPPPAYDDVAQDEDDFEICSINSTLVGAGVPAGPSQGQTNYAFVPEQARPPPPLEDNLFLPPQGGGKPPSSAQTAEIFQALQQECMRQLQAPAGSPAPSPSPGGDDKPQVPPRVPIPPRPTRPHVQLSPAPPGEEETSQWPGPASPPRVPPREPLSPQGSRTPSPLVPPGSSPLPPRLSSSPGKTMPTTQSFASDPKYATPQVIQAPGPRAGPCILPIVRDGKKVSSTHYYLLPERPSYLERYQRFLREAQSPEEPTPLPVPLLLPPPSTPAPAAPTATVRPMPQAALDPKANFSTNNSNPGARPPPPRATARLPQRGCPGDGPEAGRPADKIQMLQAMVHGVTTEECQAALQCHGWSVQRAAQYLKVEQLFGLGLRPRGECHKVLEMFDWNLEQAGCHLLGSWGPAHHKR

SEQ ID NO: 37400 - protein, 1086 aa, Homo sapiens
  REGION 1..1086: note = ENSP00000371341
MLEARPPRTQGSDAAGAAAGRGLRALLLSLTAAAGIWGSMGERSAYQRLAGGEEGPQRLGGGRMQPEEGTGWLLELLSEVQLQQYFLRLRDDLNVTRLSHFEYVKNEDLEKIGMGRPGQRRLWEAVKRRKALCKRKSWMSKVFSGKRLEAEFPPHHSQSTFRKTSPAPGGPAGEGPLQSLTCLIGEKDLRLLEKLGDGSFGVVRRGEWDAPSGKTVSVAVKCLKPDVLSQPEAMDDFIREVNAMHSLDHRNLIRLYGVVLTPPMKMVTELAPLGSLLDRLRKHQGHFLLGTLSRYAVQVAEGMGYLESKRFIHRDLAARNLLLATRDLVKIGDFGLMRALPQNDDHYVMQEHRKVPFAWCAPESLKTRTFSHASDTWMFGVTLWEMFTYGQEPWIGLNGSQILHKIDKEGERLPRPEDCPQDIYNVMVQCWAHKPEDRPTFVALRDFLLEAQPTDMRALQDFEEPDKLHIQMNDVITVIEGRAENYWWRGQNTRTLCVGPFPRNVVTSVAGLSAQDISQPLQNSFIHTGHGDSDPRHCWGFPDRIDELYLGNPMDPPDLLSVELSTSRPPQHLGGVKREPPPRPPQPAFFTQKPTYDPVSEDQDPLSSDFKRLGLRKPGLPRGLWLAKPSARVPGTKASRGSGAEVTLIDFGEEPVVPALRPCAPSLAQLAMDACSLLDETPPQSPTRALPRPLHPTPVVDWDARPLPPPPAYDDVAQDEDDFEICSINSTLVGAGVPAGPSQGQTNYAFVPEQARPPPPLEDNLFLPPQGGGKPPSSAQTAEIFQALQQECMRQLQAPAGSPAPSPSPGGDDKPQVPPRVPIPPRPTRPHVQLSPAPPGEEETSQWPGPASPPRVPPREPLSPQGSRTPSPLVPPGSSPLPPRLSSSPGKTMPTTQSFASDPKYATPQVIQAPGPRAGPCILPIVRDGKKVSSTHYYLLPERPSYLERYQRFLREAQSPEEPTPLPVPLLLPPPSTPAPAAPTATVRPMPQAALDPKANFSTNNSNPGARPPPPRATARLPQRGCPGDGPEAGRPADKIQMVEQLFGLGLRPRGECHKVLEMFDWNLEQAGCHLLGSWGPAHHKR

SEQ ID NO: 37401 - protein, 1038 aa, Homo sapiens
  REGION 1..1038: note = ENSP00000329425
MQPEEGTGWLLELLSEVQLQQYFLRLRDDLNVTRLSHFEYVKNEDLEKIGMGRPGQRRLWEAVKRRKALCKRKSWMSKVFSGKRLEAEFPPHHSQSTFRKTSPAPGGPAGEGPLQSLTCLIGEKDLRLLEKLGDGSFGVVRRGEWDAPSGKTVSVAVKCLKPDVLSQPEAMDDFIREVNAMHSLDHRNLIRLYGVVLTPPMKMVTELAPLGSLLDRLRKHQGHFLLGTLSRYAVQVAEGMGYLESKRFIHRDLAARNLLLATRDLVKIGDFGLMRALPQNDDHYVMQEHRKVPFAWCAPESLKTRTFSHASDTWMFGVTLWEMFTYGQEPWIGLNGSQILHKIDKEGERLPRPEDCPQDIYNVMVQCWAHKPEDRPTFVALRDFLLEAQPTDMRALQDFEEPDKLHIQMNDVITVIEGRAENYWWRGQNTRTLCVGPFPRNVVTSVAGLSAQDISQPLQNSFIHTGHGDSDPRHCWGFPDRIDELYLGNPMDPPDLLSVELSTSRPPQHLGGVKKPTYDPVSEDQDPLSSDFKRLGLRKPGLPRGLWLAKPSARVPGTKASRGSGAEVTLIDFGEEPVVPALRPCAPSLAQLAMDACSLLDETPPQSPTRALPRPLHPTPVVDWDARPLPPPPAYDDVAQDEDDFEICSINSTLVGAGVPAGPSQGQTNYAFVPEQARPPPPLEDNLFLPPQGGGKPPSSAQTAEIFQALQQECMRQLQAPAGSPAPSPSPGGDDKPQVPPRVPIPPRPTRPHVQLSPAPPGEEETSQWPGPASPPRVPPREPLSPQGSRTPSPLVPPGSSPLPPRLSSSPGKTMPTTQSFASDPKYATPQVIQAPGPRAGPCILPIVRDGKKVSSTHYYLLPERPSYLERYQRFLREAQSPEEPTPLPVPLLLPPPSTPAPAAPTATVRPMPQAALDPKANFSTNNSNPGARPPPPRATARLPQRGCPGDGPEAGRPADKIQMAMVHGVTTEECQAALQCHGWSVQRAAQYLKVEQLFGLGLRPRGECHKVLEMFDWNLEQAGCHLLGSWGPAHHKR

SEQ ID NO: 37402 - protein, 1040 aa, Homo sapiens
  REGION 1..1040: note = ENSP00000392546
MPAARRFPGLELSFPLLARLRRRLYTRLGGGRMQPEEGTGWLLELLSEVQLQQYFLRLRDDLNVTRLSHFEYVKNEDLEKIGMGRPGQRRLWEAVKRRKALCKRKSWMSKVFSGKRLEAEFPPHHSQSTFRKTSPAPGGPAGEGPLQSLTCLIGEKDLRLLEKLGDGSFGVVRRGEWDAPSGKTVSVAVKCLKPDVLSQPEAMDDFIREVNAMHSLDHRNLIRLYGVVLTPPMKMVTELAPLGSLLDRLRKHQGHFLLGTLSRYAVQVAEGMGYLESKRFIHRDLAARNLLLATRDLVKIGDFGLMRALPQNDDHYVMQEHRKVPFAWCAPESLKTRTFSHASDTWMFGVTLWEMFTYGQEPWIGLNGSQILHKIDKEGERLPRPEDCPQDIYNVMVQCWAHKPEDRPTFVALRDFLLEAQPTDMRALQDFEEPDKLHIQMNDVITVIEGRAENYWWRGQNTRTLCVGPFPRNVVTSVAGLSAQDISQPLQNSFIHTGHGDSDPRHCWGFPDRIDELYLGNPMDPPDLLSVELSTSRPPQHLGGVKKPTYDPVSEDQDPLSSDFKRLGLRKPGLPRGLWLAKPSARVPGTKASRGSGAEVTLIDFGEEPVVPALRPCAPSLAQLAMDACSLLDETPPQSPTRALPRPLHPTPVVDWDARPLPPPPAYDDVAQDEDDFEICSINSTLVGAGVPAGPSQGQTNYAFVPEQARPPPPLEDNLFLPPQGGGKPPSSAQTAEIFQALQQECMRQLQAPAGSPAPSPSPGGDDKPQVPPRVPIPPRPTRPHVQLSPAPPGEEETSQWPGPASPPRVPPREPLSPQGSRTPSPLVPPGSSPLPPRLSSSPGKTMPTTQSFASDPKYATPQVIQAPGPRAGPCILPIVRDGKKVSSTHYYLLPERPSYLERYQRFLREAQSPEEPTPLPVPLLLPPPSTPAPAAPTATVRPMPQAALDPKANFSTNNSNPGARPPPPRATARLPQRGCPGDGPEAGRPADKIQMVEQLFGLGLRPRGECHKVLEMFDWNLEQAGCHLLGSWGPAHHKR

SEQ ID NO: 37403 - protein, 528 aa, Homo sapiens
  REGION 1..528: note = ENSP00000395588
MQPEEGTGWLLELLSEVQLQQYFLRLRDDLNVTRLSHFEYVKNEDLEKIGMGRPGQRRLWEAVKRRKALCKRKSWMSKVFSGKRLEAEFPPHHSQSTFRKTSPAPGGPAGEGPLQSLTCLIGEKDLRLLEKLGDGSFGVVRRGEWDAPSGKTVSVAVKCLKPDVLSQPEAMDDFIREVNAMHSLDHRNLIRLYGVVLTPPMKMVTELAPLGSLLDRLRKHQGHFLLGTLSRYAVQVAEGMGYLESKRFIHRDLAARNLLLATRDLVKIGDFGLMRALPQNDDHYVMQEHRKVPFAWCAPESLKTRTFSHASDTWMFGVTLWEMFTYGQEPWIGLNGSQILHKIDKEGERLPRPEDCPQDIYNVMVQCWAHKPEDRPTFVALRDFLLEAQPTDMRALQDFEEPDKLHIQMNDVITVIEGRAENYWWRGQNTRTLCVGPFPRNVVTSVAGLSAQDISQPLQNSFIHTGHGDSDPRHCWGFPDRIDECPFSAFSPGHPPAETCGQVLWTGRREACASDPRLHPVSSRTKGL

SEQ ID NO: 37404 - protein, 242 aa, Homo sapiens
  REGION 1..242: note = ENSP00000390435
  VARIANT 1: note = Any amino acid
XLWGLLPPGPPALAWNHSTCPPCLELLRRAENYWWRGQNTRTLCVGPFPRNVVTSVAGLSAQDISQPLQNSFIHTGHGDSDPRHCWGFPDRIDELYLGNPMDPPDLLSVELSTSRPPQHLGGVKKPTYDPVSEDQDPLSSDFKRLGLRKPGLPRGLWLAKPSARVPGTKASRGSGAEVTLIDFGEEPVVPALRPCAPSLAQLAMDACSLLDETPPQSPTRALPRPLHPTPVVDWDARPLPPP

SEQ ID NO: 37405 - protein, 200 aa, Homo sapiens
  REGION 1..200: note = ENSP00000415126
VGPSRWFPVAAAGGALGAPSPWATSPGLEPQHLPSVPGAAQESLNISMFVWLPPSPCLQADGSVAENYWWRGQNTRTLCVGPFPRNVVTSVAGLSAQDISQPLQNSFIHTGHGDSDPRHCWGFPDRIDELYLGNPMDPPDLLSVELSTSRPPQHLGGVKKPTYDPVSEDQDPLSSDFKRLGLRKPGLPRGLWLAKPSARV

SEQ ID NO: 37406 - protein, 290 aa, Homo sapiens
  REGION 1..290: note = ENSP00000392253
  VARIANT 1: note = Any amino acid
XPEEGTGWLLELLSEVQLQQYFLRLRDDLNVTRLSHFEYVKNEDLEKIGMGRPGQRRLWEAVKRRKALCKRKSWMSKVSVAVKCLKPDVLSQPEAMDDFIREVNAMHSLDHRNLIRLYGVVLTPPMKMVTELAPLGSLLDRLRKHQGHFLLGTLSRYAVQVAEGMGYLESKRFIHRDLAARNLLLATRDLVKIGDFGLMRALPQNDDHYVMQEHRKVPFAWCAPESLKTRTFSHASDTWMFGVTLWEMFTYGQEPWIGLNGSQILHKIDKEGERLPRPEDCPQDIYNVMV

SEQ ID NO: 37407 - protein, 143 aa, Homo sapiens
  REGION 1..143: note = ENSP00000409462
VFSGKRLEAEFPPHHSQSTFRKTSPAPGGPAGEGPLQSLTCLIGEKDLRLLEKLGDGSFGVVRRGEWDAPSGKTVSVAVKCLKPDVLSQPEAMDDFIREVNAMHSLDHRNLIRLYGVVLTPPMKMASVSQIASRERPEKLQDS

SEQ ID NO: 37408 - protein, 86 aa, Homo sapiens
  REGION 1..86: note = ENSP00000393707
MQPEEGTGWLLELLSEVQLQQYFLRLRDDLNVTRLSHFEYVKNEDLEKIGMGRPGQRRLWEAVKRRKALCKRKSWMSKDEGQPTPW

SEQ ID NO: 37409 - protein, 97 aa, Homo sapiens
  REGION 1..97: note = ENSP00000395154
MQPEEGTGWLLELLSEVQLQQYFLRLRDDLNVTRLSHFEYVKNEDLEKIGMGRPGQRRLWEAVKRRKALCKRKSWMSKVFSGKRLEAEFPPHHSQST

SEQ ID NO: 37410 - protein, 143 aa, Homo sapiens
  REGION 1..143: note = ENSP00000390088
MRSGALGPRGRGRASALGLPVPAMASRQCWARHPRVGLCWAAFEQESGPSCHRSEVKERLGGGRMQPEEGTGWLLELLSEVQLQQYFLRLRDDLNVTRLSHFEYVKNEDLEKIGMGRPGQRRLWEAVKRRKALCKRKSWMSKV

SEQ ID NO: 37411 - protein, 187 aa, Homo sapiens
  REGION 1..187: note = ENSP00000354488
MPEVERKPKITASRKLLLKSLMLAKAKECWEQEHEEREAEKVRYLAERIPTLQTRGLSLSALQDLCRELHAKVEVVDEERYDIEAKCLHNTREIKDLKLKVMDLRGKFKRPPLRRVRVSADAMLRALLGSKHKVSMDLRANLKSVKKEDTEKERPVEVGDWRKNVEAMSGMEGRKKMFDAAKSPTSQ

SEQ ID NO: 37412 - protein, 187 aa, Homo sapiens; identical to SEQ ID NO: 37411
  REGION 1..187: note = ENSP00000337022

SEQ ID NO: 37413 - protein, 105 aa, Homo sapiens
  REGION 1..105: note = ENSP00000451307
MPEVERKPKITASRKLLLKSLMLAKAKECWEQEHEEREAEKVRYLAERIPTLQTRGLSLSALQDLCRELHAKVEVVDEERYDIEAMSGMEGRKKMFDAAKSPTSQ

SEQ ID NO: 37414 - protein, 187 aa, Homo sapiens; identical to SEQ ID NO: 37411
  REGION 1..187: note = ENSP00000356281

SEQ ID NO: 37415 - protein, 131 aa, Homo sapiens
  REGION 1..131: note = ENSP00000451660
MLAKAKECWEQEHEEREAEKVRYLAERIPTLQTRGLSLSALQDLCRELHAKVEVVDEERYDIEAKCLHNTREIKDLKLKVMDLRGKFKRPPLRRVRVSADAMLRALLGSKHKVSMDLRANLKSVKKEDTEK

SEQ ID NO: 37416 - protein, 137 aa, Homo sapiens
  REGION 1..137: note = ENSP00000451776
MPEVERKPKITASRKLLLKSLMLAKAKECWEQEHEEREAEKVRYLAERIPTLQTRGLSLSALQDLCRELHAKVEVVDEERYDIEAKCLHNTREIKDLKLKVMDLRGKFKRPPLRRVRVSADAMLRALLGSKHKVSMD

SEQ ID NO: 37417 - protein, 187 aa, Homo sapiens [sequence omitted]

SEQ ID NO: 37418 - protein, 1358 aa, Homo sapiens
  REGION 1..1358: note = ENSP00000356646
MGADGETVVLKNMLIGINLILLGSMIKPSECQLEVTTERVQRQSVEEEGGIANYNTSSKEQPVVFNHVYNINVPLDNLCSSGLEASAEQEVSAEDETLAEYMGQTSDHESQVTFTHRINFPKKACPCASSAQVLQELLSRIEMLEREVSVLRDQCNANCCQESAATGQLDYIPHCSGHGNFSFESCGCICNEGWFGKNCSEPYCPLGCSSRGVCVDGQCICDSEYSGDDCSELRCPTDCSSRGLCVDGECVCEEPYTGEDCRELRCPGDCSGKGRCANGTCLCEEGYVGEDCGQRQCLNACSGRGQCEEGLCVCEEGYQGPDCSAVAPPEDLRVAGISDRSIELEWDGPMAVTEYVISYQPTALGGLQLQQRVPGDWSGVTITELEPGLTYNISVYAVISNILSLPITAKVATHLSTPQGLQFKTITETTVEVQWEPFSFSFDGWEISFIPKNNEGGVIAQVPSDVTSFNQTGLKPGEEYIVNVVALKEQARSPPTSASVSTVIDGPTQILVRDVSDTVAFVEWIPPRAKVDFILLKYGLVGGEGGRTTFRLQPPLSQYSVQALRPGSRYEVSVSAVRGTNESDSATTQFTTEIDAPKNLRVGSRTATSLDLEWDNSEAEVQEYKVVYSTLAGEQYHEVLVPRGIGPTTRATLTDLVPGTEYGVGISAVMNSQQSVPATMNARTELDSPRDLMVTASSETSISLIWTKASGPIDHYRITFTPSSGIASEVTVPKDRTSYTLTDLEPGAEYIISVTAERGRQQSLESTVDAFTGFRPISHLHFSHVTSSSVNITWSDPSPPADRLILNYSPRDEEEEMMEVSLDATKRHAVLMGLQPATEYIVNLVAVHGTVTSEPIVGSITTGIDPPKDITISNVTKDSVMVSWSPPVASFDYYRVSYRPTQVGRLDSSVVPNTVTEFTITRLNPATEYEISLNSVRGREESERICTLVHTAMDNPVDLIATNITPTEALLQWKAPVGEVENYVIVLTHFAVAGETILVDGVSEEFRLVDLLPSTHYTATMYATNGPLTSGTISTNFSTLLDPPANLTASEVTRQSALISWQPPRAEIENYVLTYKSTDGSRKELIVDAEDTWIRLEGLLENTDYTVLLQAAQDTTWSSITSTAFTTGGRVFPHPQDCAQHLMNGDTLSGVYPIFLNGELSQKLQVYCDMTTDGGGWIVFQRRQNGQTDFFRKWADYRVGFGNVEDEFWLGLDNIHRITSQGRYELRVDMRDGQEAAFASYDRFSVEDSRNLYKLRIGSYNGTAGDSLSYHQGRPFSTEDRDNDVAVTNCAMSYKGAWWYKNCHRTNLNGKYGESRHSQGINWYHWKGHEFSIPFVEMKMRPYNHRLMAGRKRQSLQF

SEQ ID NO: 37419 - protein, 180 aa, Homo sapiens
  REGION 1..180: note = ENSP00000403413
  VARIANT 1: note = Any amino acid
XINFPKKACPCASSAQVLQELLSRIEMLEREVSVLRDQCNANCCQESAATVAPPEDLRVAGISDRSIELEWDGPMAVTEYVISYQPTALGGLQLQQRVPGDWSGVTITELEPGLTYNISVYAVISNILSLPITAKVATHLSTPQGLQFKTITETTVEVQWEPFSFSFDGWEISFIPKNNE

SEQ ID NO: 37420 - protein, 1358 aa, Homo sapiens; identical to SEQ ID NO: 37418
  REGION 1..1358: note = ENSP00000263525

SEQ ID NO: 37421 - protein, 1735 aa, Homo sapiens
  REGION 1..1735: note = ENSP00000171887
MSVSRTMEDSCELDLVYVTERIIAVSFPSTANEENFRSNLREVAQMLKSKHGGNYLLFNLSERRPDITKLHAKVLEFGWPDLHTPALEKICSICKAMDTWLNADPHNVVVLHNKGNRGRIGVVIAAYMHYSNISASADQALDRFAMKRFYEDKIVPIGQPSQRRYVHYFSGLLSGSIKMNNKPLFLHHVIMHGIPNFESKGGCRPFLRIYQAMQPVYTSGIYNIPGDSQTSVCITIEPGLLLKGDILLKCYHKKFRSPARDVIFRVQFHTCAIHDLGVVFGKEDLDDAFKDDRFPEYGKVEFVFSYGPEKIQGMEHLENGPSVSVDYNTSDPLIRWDSYDNFSGHRDDGMEEVVGHTQGPLDGSLYAKVKKKDSLHGSTGAVNATRPTLSATPNHVEHTLSVSSDSGNSTASTKTDKTDEPVPGASSATAALSPQEKRELDRLLSGFGLEREKQGAMYHTQHLRSRPAGGSAVPSSGRHVVPAQVHVNGGALASERETDILDDELPNQDGHSAGSMGTLSSLDGVTNTSEGGYPEALSPLTNGLDKSYPMEPMVNGGGYPYESASRAGPAHAGHTAPMRPSYSAQEGLAGYQREGPHPAWPQPVTTSHYAHDPSGMFRSQSFSEAEPQLPPAPVRGGSSREAVQRGLNSWQQQQQQQQQPRPPPRQQERAHLESLVASRPSPQPLAETPIPSLPEFPRAASQQEIEQSIETLNMLMLDLEPASAAAPLHKSQSVPGAWPGASPLSSQPLSGSSRQSHPLTQSRSGYIPSGHSLGTPEPAPRASLESVPPGRSYSPYDYQPCLAGPNQDFHSKSPASSSLPAFLPTTHSPPGPQQPPASLPGLTAQPLLSPKEATSDPSRTPEEEPLNLEGLVAHRVAGVQAREKQPAEPPAPLRRRAASDGQYENQSPEATSPRSPGVRSPVQCVSPELALTIALNPGGRPKEPHLHSYKEAFEEMEGTSPSSPPPSGVRSPPGLAKTPLSALGLKPHNPADILLHPTGVTRRRIQPEEDEGKVVVRLSEEPRSYVESVARTAVAGPRAQDSEPKSFSAPATQAYGHEIPLRNGTLGGSFVSPSPLSTSSPILSADSTSVGSFPSGESSDQGPRTPTQPLLESGFRSGSLGQPSPSAQRNYQSSSPLPTVGSSYSSPDYSLQHFSSSPESQARAQFSVAGVHTVPGSPQARHRTVGTNTPPSPGFGWRAINPSMAAPSSPSLSHHQMMGPPGTGFHGSTVSSPQSSAATTPGSPSLCRHPAGVYQVSGLHNKVATTPGSPSLGRHPGAHQGNLASGLHSNAIASPGSPSLGRHLGGSGSVVPGSPCLDRHVAYGGYSTPEDRRPTLSRQSSASGYQAPSTPSFPVSPAYYPGLSSPATSPSPDSAAFRQGSPTPALPEKRRMSVGDRAGSLPNYATINGKVSSPVASGMSSPSGGSTVSFSHTLPDFSKYSMPDNSPETRAKVKFVQDTSKYWYKPEISREQAIALLKDQEPGAFIIRDSHSFRGAYGLAMKVSSPPPTIMQQNKKGDMTHELVRHFLIETGPRGVKLKGCPNEPNFGSLSALVYQHSIIPLALPCKLVIPNRDPTDESKDSSGPANSTADLLKQGAACNVLFVNSVDMESLTGPQAISKATSETLAADPTPAATIVHFKVSAQGITLTDNQRKLFFRRHYPLNTVTFCDLDPQERKWMKTEGGAPAKLFGFVARKQGSTTDNACHLFAELDPNQPASAIVNFVSKVMLNAGQKR

SEQ ID NO: 37422 - protein, 846 aa, Homo sapiens
  REGION 1..846: note = ENSP00000394171
MEQLVKERKGVQAREKQPAEPPAPLRRRAASDGQYENQSPEATSPRSPGVRSPVQCVSPELALTIALNPGGRPKEPHLHSYKEAFEEMEGTSPSSPPPSGVRSPPGLAKTPLSALGLKPHNPADILLHPTGEPRSYVESVARTAVAGPRAQDSEPKSFSAPATQAYGHEIPLRNGTLGGSFVSPSPLSTSSPILSADSTSVGSFPSGESSDQGPRTPTQPLLESGFRSGSLGQPSPSAQRNYQSSSPLPTVGSSYSSPDYSLQHFSSSPESQARAQFSVAGVHTVPGSPQARHRTVGTNTPPSPGFGWRAINPSMAAPSSPSLSHHQMMGPPGTGFHGSTVSSPQSSAATTPGSPSLCRHPAGVYQVSGLHNKVATTPGSPSLGRHPGAHQGNLASGLHSNAIASPGSPSLGRHLGGSGSVVPGSPCLDRHVAYGGYSTPEDRRPTLSRQSSASGYQAPSTPSFPVSPAYYPGLSSPATSPSPDSAAFRQGSPTPALPEKRRMSVGDRAGSLPNYATINGKVSSPVASGMSSPSGGSTVSFSHTLPDFSKYSMPDNSPETRAKVKFVQDTSKYWYKPEISREQAIALLKDQEPGAFIIRDSHSFRGAYGLAMKVSSPPPTIMQQNKKGDMTHELVRHFLIETGPRGVKLKGCPNEPNFGSLSALVYQHSIIPLALPCKLVIPNRDPTDESKDSSGPANSTADLLKQGAACNVLFVNSVDMESLTGPQAISKATSETLAADPTPAATIVHFKVSAQGITLTDNQRKLFFRRHYPLNTVTFCDLDPQERKWMKTEGGAPAKLFGFVARKQGSTTDNACHLFAELDPNQPASAIVNFVSKVMLNAGQKR

SEQ ID NO: 37423 - protein, 1721 aa, Homo sapiens
  REGION 1..1721: note = ENSP00000408724
MSVSRTMEDSCELDLVYVTERIIAVSFPSTANEENFRSNLREVAQMLKSKHGGNYLLFNLSERRPDITKLHAKVLEFGWPDLHTPALEKICSICKAMDTWLNADPHNVVVLHNKGNRGRIGVVIAAYMHYSNISASADQALDRFAMKRFYEDKIVPIGQPSQRRYVHYFSGLLSGSIKMNNKPLFLHHVIMHGIPNFESKGGCRPFLRIYQAMQPVYTSGIYNIPGDSQTSVCITIEPGLLLKGDILLKCYHKKFRSPARDVIFRVQFHTCAIHDLGVVFGKEDLDDAFKDDRFPEYGKVEFVFSYGPEKIQGMEHLENGPSVSVDYNTSDPLIRWDSYDNFSGHRDDGMEEVVGHTQGPLDGSLYAKVKKKDSLHGSTGAVNATRPTLSATPNHVEHTLSVSSDSGNSTASTKTDKTDEPVPGASSATAALSPQEKRELDRLLSGFGLEREKQGAMYHTQHLRSRPAGGSAVPSSGRHVVPAQVHVNGGALASERETDILDDELPNQDGHSAGSMGTLSSLDGVTNTSEGGYPEALSPLTNGLDKSYPMEPMVNGGGYPYESASRAGPAHAGHTAPMRPSYSAQEGLAGYQREGPHPAWPQPVTTSHYAHDPSGMFRSQSFSEAEPQLPPAPVRGGSSREAVQRGLNSWQQQQQQQQQPRPPPRQQERAHLESLVASRPSPQPLAETPIPSLPEFPRAASQQEIEQSIETLNMLMLDLEPASAAAPLHKSQSVPGAWPGASPLSSQPLSGSSRQSHPLTQSRSGYIPSGHSLGTPEPAPRASLESVPPGRSYSPYDYQPCLAGPNQDFHSKSPASSSLPAFLPTTHSPPGPQQPPASLPGLTAQPLLSPKEATSDPSRTPEEEPLNLEGLVAHRVAGVQAREKQPAEPPAPLRRRAASDGQYENQSPEATSPRSPGVRSPVQCVSPELALTIALNPGGRPKEPHLHSYKEAFEEMEGTSPSSPPPSGVRSPPGLAKTPLSALGLKPHNPADILLHPTGVTRRRIQPEPRSYVESVARTAVAGPRAQDSEPKSFSAPATQAYGHEIPLRNGTLGGSFVSPSPLSTSSPILSADSTSVGSFPSGESSDQGPRTPTQPLLESGFRSGSLGQPSPSAQRNYQSSSPLPTVGSSYSSPDYSLQHFSSSPESQARAQFSVAGVHTVPGSPQARHRTVGTNTPPSPGFGWRAINPSMAAPSSPSLSHHQMMGPPGTGFHGSTVSSPQSSAATTPGSPSLCRHPAGVYQVSGLHNKVATTPGSPSLGRHPGAHQGNLASGLHSNAIASPGSPSLGRHLGGSGSVVPGSPCLDRHVAYGGYSTPEDRRPTLSRQSSASGYQAPSTPSFPVSPAYYPGLSSPATSPSPDSAAFRQGSPTPALPEKRRMSVGDRAGSLPNYATINGKVSSPVASGMSSPSGGSTVSFSHTLPDFSKYSMPDNSPETRAKVKFVQDTSKYWYKPEISREQAIALLKDQEPGAFIIRDSHSFRGAYGLAMKVSSPPPTIMQQNKKDMTHELVRHFLIETGPRGVKLKGCPNEPNFGSLSALVYQHSIIPLALPCKLVIPNRDPTDESKDSSGPANSTADLLKQGAACNVLFVNSVDMESLTGPQAISKATSETLAADPTPAATIVHFKVSAQGITLTDNQRKLFFRRHYPLNTVTFCDLDPQERKWMKTEGGAPAKLFGFVARKQGSTTDNACHLFAELDPNQPASAIVNFVSKVMLNAGQKR

SEQ ID NO: 37424 - protein, 1714 aa, Homo sapiens
  REGION 1..1714: note = ENSP00000406016
MSVSRTMEDSCELDLVYVTERIIAVSFPSTANEENFRSNLREVAQMLKSKHGGNYLLFNLSERRPDITKLHAKVLEFGWPDLHTPALEKICSICKAMDTWLNADPHNVVVLHNKGNRGRIGVVIAAYMHYSNISASADQALDRFAMKRFYEDKIVPIGQPSQRRYVHYFSGLLSGSIKMNNKPLFLHHVIMHGIPNFESKGGCRPFLRIYQAMQPVYTSGIYNIPGDSQTSVCITIEPGLLLKGDILLKCYHKKFRSPARDVIFRVQFHTCAIHDLGVVFGKEDLDDAFKDDRFPEYGKVEFVFSYGPEKIQGMEHLENGPSVSVDYNTSDPLIRWDSYDNFSGHRDDGMEEVVGHTQGPLDGSLYAKVKKKDSLHGSTGAVNATRPTLSATPNHVEHTLSVSSDSGNSTASTKTDKTDEPVPGASSATAALSPQEKRELDRLLSGFGLEREKQGAMYHTQHLRSRPAGGSAVPSSGRHVVPAQVHVNGGALASERETDILDDELPNQDGHSAGSMGTLSSLDGVTNTSEGGYPEALSPLTNGLDKSYPMEPMVNGGGYPYESASRAGPAHAGHTAPMRPSYSAQEGLAGYQREGPHPAWPQPVTTSHYAHDPSGMFRSQSFSEAEPQLPPAPVRGGSSREAVQRGLNSWQQQQQQQQQPRPPPRQQERAHLESLVASRPSPQPLAETPIPSLPEFPRAASQQEIEQSIETLNMLMLDLEPASAAAPLHKSQSVPGAWPGASPLSSQPLSGSSRQSHPLTQSRSGYIPSGHSLGTPEPAPRASLESVPPGRSYSPYDYQPCLAGPNQDFHSKSPASSSLPAFLPTTHSPPGPQQPPASLPGLTAQPLLSPKEATSDPSRTPEEEPLNLEGLVAHRVAGVQAREKQPAEPPAPLRRRAASDGQYENQSPEATSPRSPGVRSPVQCVSPELALTIALNPGGRPKEPHLHSYKEAFEEMEGTSPSSPPPSGVRSPPGLAKTPLSALGLKPHNPADILLHPTGEPRSYVESVARTAVAGPRAQDSEPKSFSAPATQAYGHEIPLRNGTLGGSFVSPSPLSTSSPILSADSTSVGSFPSGESSDQGPRTPTQPLLESGFRSGSLGQPSPSAQRNYQSSSPLPTVGSSYSSPDYSLQHFSSSPESQARAQFSVAGVHTVPGSPQARHRTVGTNTPPSPGFGWRAINPSMAAPSSPSLSHHQMMGPPGTGFHGSTVSSPQSSAATTPGSPSLCRHPAGVYQVSGLHNKVATTPGSPSLGRHPGAHQGNLASGLHSNAIASPGSPSLGRHLGGSGSVVPGSPCLDRHVAYGGYSTPEDRRPTLSRQSSASGYQAPSTPSFPVSPAYYPGLSSPATSPSPDSAAFRQGSPTPALPEKRRMSVGDRAGSLPNYATINGKVSSPVASGMSSPSGGSTVSFSHTLPDFSKYSMPDNSPETRAKVKFVQDTSKYWYKPEISREQAIALLKDQEPGAFIIRDSHSFRGAYGLAMKVSSPPPTIMQQNKKGDMTHELVRHFLIETGPRGVKLKGCPNEPNFGSLSALVYQHSIIPLALPCKLVIPNRDPTDESKDSSGPANSTADLLKQGAACNVLFVNSVDMESLTGPQAISKATSETLAADPTPAATIVHFKVSAQGITLTDNQRKLFFRRHYPLNTVTFCDLDPQERKWMKTEGGAPAKLFGFVARKQGSTTDNACHLFAELDPNQPASAIVNFVSKVMLNAGQKR

SEQ ID NO: 37425 - protein, 780 aa, Homo sapiens
  REGION 1..780: note = ENSP00000405460
MTWICLSCMLWPEDLEAPKTHRFKVKTFKKVKPCGICRQVITQEGCTCKVCSFSCHRKCQAKVAAPCVPPSNHELVPITTENAPKNVVDKGEGASRGGNTRKSLEDNGSTRVTPSVQPHLQPIRNMSVSRTMEDSCELDLVYVTERIIAVSFPSTANEENFRSNLREVAQMLKSKHGGNYLLFNLSERRPDITKLHAKVLEFGWPDLHTPALEKICSICKAMDTWLNADPHNVVVLHNKGNRGRIGVVIAAYMHYSNISASADQALDRFAMKRFYEDKIVPIGQPSQRRYVHYFSGLLSGSIKMNNKPLFLHHVIMHGIPNFESKGGCRPFLRIYQAMQPVYTSGIYNIPGDSQTSVCITIEPGLLLKGDILLKCYHKKFRSPARDVIFRVQFHTCAIHDLGVVFGKEDLDDAFKDDRFPEYGKVEFVFSYGPEKIQGMEHLENGPSVSVDYNTSDPLIRWDSYDNFSGHRDDGMEEVVGHTQGPLDGSLYAKVKKKDSLHGSTGAVNATRPTLSATPNHVEHTLSVSSDSGNSTASTKTDKTDEPVPGASSATAALSPQEKRELDRLLSGFGLEREKQGAMYHTQHLRSRPAGGSAVPSSGRHVVPAQVHVNGGALASERETDILDDELPNQDGHSAGSMGTLSSLDGVTNTSEGGYPEALSPLTNGLDKSYPMEPMVNGGGYPYESASRAGPAHAGHTAPMRPSYSAQEGLAGYQREGPHPAWPQPVTTSHYAHDPSGMFRSQSFSEAEPQLPPAPVRGGSSREAVQRGLNSWQQQQQ

SEQ ID NO: 37426 - protein, 487 aa, Homo sapiens
  REGION 1..487: note = ENSP00000400383
MVSPLPPPHCPGAALHVQPYKAAASHGPHGASPGGAGSMPLKLVGKVLLKGSTRVTPSVQPHLQPIRNMSVSRTMEDSCELDLVYVTERIIAVSFPSTANEENFRSNLREVAQMLKSKHGGNYLLFNLSERRPDITKLHAKVLEFGWPDLHTPALEKICSICKAMDTWLNADPHNVVVLHNKGNRGRIGVVIAAYMHYSNISASADQALDRFAMKRFYEDKIVPIGQPSQRRYVHYFSGLLSGSIKMNNKPLFLHHVIMHGIPNFESKGGCRPFLRIYQAMQPVYTSGIYNIPGDSQTSVCITIEPGLLLKGDILLKCYHKKFRSPARDVIFRVQFHTCAIHDLGVVFGKEDLDDAFKDDRFPEYGKVEFVFSYGPEKIQGMEHLENGPSVSVDYNTSDPLIRWDSYDNFSGHRDDGMEEVVGHTQGPLDGSLYAKVKKKDSLHGSTGAVNATRPTLSATPNHVEHTLSVSSDSGNSTASTKTDKTD

SEQ ID NO: 37427 - protein, 416 aa, Homo sapiens
  REGION 1..416: note = ENSP00000308321
MVPFQQRKDCVLEGSTRVTPSVQPHLQPIRNMSVSRTMEDSCELDLVYVTERIIAVSFPSTANEENFRSNLREVAQMLKSKHGGNYLLFNLSERRPDITKLHAKVLEFGWPDLHTPALEKICSICKAMDTWLNADPHNVVVLHNKGNRGRIGVVIAAYMHYSNISASADQALDRFAMKRFYEDKIVPIGQPSQRRYVHYFSGLLSGSIKMNNKPLFLHHVIMHGIPNFESKGGCRPFLRIYQAMQPVYTSGIYNIPGDSQTSVCITIEPGLLLKGDILLKCYHKKFRSPARDVIFRVQFHTCAIHDLGVVFGKEDLDDAFKDDRFPEYGKVEFVFSYGPEKIQGMEHLENGPSVSVDYNTSDPLIRWDSYDNFSGHRDDGMEDGNKQNTNSQSIGSISGGLEDQYTWPDTHWPSQS

SEQ ID NO: 37428 - protein, 149 aa, Homo sapiens
  REGION 1..149: note = ENSP00000414704
  VARIANT 1: note = Any amino acid
XGDSQTSVCITIEPGLLLKGDILLKCYHKKFRSPARDVIFRVQFHTCAIHDLGVVFGKEDLDDAFKDDRFPEYGKVEFVFSYGPEKIQGMEHLENGPSVSVDYNTSDPLIRWDSYDNFSGHRDDGMEGAQHPQIGQDTPPGPSDPPGCL

SEQ ID NO: 37429 - protein, 102 aa, Homo sapiens
  REGION 1..102: note = ENSP00000395615
MSVSRTMEDSCELDLVYVTERIIAVSFPSTANEENFRSNLREVAQMLKSKHGGNYLLFNLSERRPDITKLHAKVLEFGWPDLHTPALEKICSICKAMDTWLN

SEQ ID NO: 37430 - protein, 61 aa, Homo sapiens
  REGION 1..61: note = ENSP00000404477
MSVSRTMEDSCELDLVYVTERIIAVSFPSTANEENFRSNLREVAQMLKSKHGGNYLLFNLS

SEQ ID NO: 37431 - protein, 122 aa, Homo sapiens
  REGION 1..122: note = ENSP00000411349
MQVAAPCVPPSNHELVPITTENAPKNVVDKGEGASRGGNTRKSLEDNGSTRVTPSVQPHLQPIRNMSVSRTMEDSCELDLVYVTERIIAVSFPSTANEENFRSNLREVAQMLKSKHGGNYLV

SEQ ID NO: 37432 - protein, 24 aa, Homo sapiens
  REGION 1..24: note = ENSP00000393925
MSVSRTMEDSCELDLVYVTERIIA

SEQ ID NO: 37433 - protein, 1721 aa, Homo sapiens; identical to SEQ ID NO: 37423
  REGION 1..1721: note = ENSP00000484271

SEQ ID NO: 37434 - protein, 1365 aa, Homo sapiens
  REGION 1..1365: note = ENSP00000480559
MEEVVGHTQGPLDGSLYAKVKKKDSLHGSTGAVNATRPTLSATPNHVEHTLSVSSDSGNSTASTKTDKTDEPVPGASSATAALSPQEKRELDRLLSGFGLEREKQGAMYHTQHLRSRPAGGSAVPSSGRHVVPAQVHVNGGALASERETDILDDELPNQDGHSAGSMGTLSSLDGVTNTSEGGYPEALSPLTNGLDKSYPMEPMVNGGGYPYESASRAGPAHAGHTAPMRPSYSAQEGLAGYQREGPHPAWPQPVTTSHYAHDPSGMFRSQSFSEAEPQLPPAPVRGGSSREAVQRGLNSWQQQQQQQQQPRPPPRQQERAHLESLVASRPSPQPLAETPIPSLPEFPRAASQQEIEQSIETLNMLMLDLEPASAAAPLHKSQSVPGAWPGASPLSSQPLSGSSRQSHPLTQSRSGYIPSGHSLGTPEPAPRASLESVPPGRSYSPYDYQPCLAGPNQDFHSKSPASSSLPAFLPTTHSPPGPQQPPASLPGLTAQPLLSPKEATSDPSRTPEEEPLNLEGLVAHRVAGVQAREKQPAEPPAPLRRRAASDGQYENQSPEATSPRSPGVRSPVQCVSPELALTIALNPGGRPKEPHLHSYKEAFEEMEGTSPSSPPPSGVRSPPGLAKTPLSALGLKPHNPADILLHPTGEPRSYVESVARTAVAGPRAQDSEPKSFSAPATQAYGHEIPLRNGTLGGSFVSPSPLSTSSPILSADSTSVGSFPSGESSDQGPRTPTQPLLESGFRSGSLGQPSPSAQRNYQSSSPLPTVGSSYSSPDYSLQHFSSSPESQARAQFSVAGVHTVPGSPQARHRTVGTNTPPSPGFGWRAINPSMAAPSSPSLSHHQMMGPPGTGFHGSTVSSPQSSAATTPGSPSLCRHPAGVYQVSGLHNKVATTPGSPSLGRHPGAHQGNLASGLHSNAIASPGSPSLGRHLGGSGSVVPGSPCLDRHVAYGGYSTPEDRRPTLSRQSSASGYQAPSTPSFPVSPAYYPGLSSPATSPSPDSAAFRQGSPTPALPEKRRMSVGDRAGSLPNYATINGKVSSPVASGMSSPSGGSTVSFSHTLPDFSKYSMPDNSPETRAKVKFVQDTSKYWYKPEISREQAIALLKDQEPGAFIIRDSHSFRGAYGLAMKVSSPPPTIMQQNKKGDMTHELVRHFLIETGPRGVKLKGCPNEPNFGSLSALVYQHSIIPLALPCKLVIPNRDPTDESKDSSGPANSTADLLKQGAACNVLFVNSVDMESLTGPQAISKATSETLAADPTPAATIVHFKVSAQGITLTDNQRKLFFRRHYPLNTVTFCDLDPQERKWMKTEGGAPAKLFGFVARKQGSTTDNACHLFAELDPNQPASAIVNFVSKVMLNAGQKR

SEQ ID NO: 37435 - protein, 21 aa, Homo sapiens
  REGION 1..21: note = ENSP00000387990
  VARIANT 1: note = Any amino acid
XIFCALDPQDRKWIKDGPSSK

SEQ ID NO: 37436 - protein, 1445 aa, Homo sapiens
  REGION 1..1445: note = ENSP00000312143
MEEGHGLDLTYITERIIAVSFPAGCSEESYLHNLQEVTRMLKSKHGDNYLVLNLSEKRYDLTKLNPKIMDVGWPELHAPPLDKMCTICKAQESWLNSNLQHVVVIHCRGGKGRIGVVISSYMHFTNVSASADQALDRFAMKKFYDDKVSALMQPSQKRYVQFLSGLLSGSVKMNASPLFLHFVILHGTPNFDTGGVCRPFLKLYQAMQPVYTSGIYNVGPENPSRICIVIEPAQLLKGDVMVKCYHKKYRSATRDVIFRLQFHTGAVQGYGLVFGKEDLDNASKDDRFPDYGKVELVFSATPEKIQGSEHLYNDHGVIVDYNTTDPLIRWDSYENLSADGEVLHTQGPVDGSLYAKVRKKSSSDPGIPGGPQAIPATNSPDHSDHTLSVSSDSGHSTASARTDKTEERLAPGTRRGLSAQEKAELDQLLSGFGLEDPGSSLKEMTDARSKYSGTRHVVPAQVHVNGDAALKDRETDILDDEMPHHDLHSVDSLGTLSSSEGPQSAHLGPFTCHKSSQNSLLSDGFGSNVGEDPQGTLVPDLGLGMDGPYERERTFGSREPKQPQPLLRKPSVSAQMQAYGQSSYSTQTWVRQQQMVVAHQYSFAPDGEARLVSRCPADNPGLVQAQPRVPLTPTRGTSSRVAVQRGVGSGPHPPDTQQPSPSKAFKPRFPGDQVVNGAGPELSTGPSPGSPTLDIDQSIEQLNRLILELDPTFEPIPTHMNALGSQANGSVSPDSVGGGLRASSRLPDTGEGPSRATGRQGSSAEQPLGGRLRKLSLGQYDNDAGGQLPFSKCAWGKAGVDYAPNLPPFPSPADVKETMTPGYPQDLDIIDGRILSSKESMCSTPAFPVSPETPYVKTALRHPPFSPPEPPLSSPASQHKGGREPRSCPETLTHAVGMSESPIGPKSTMLRADASSTPSFQQAFASSCTISSNGPGQRRESSSSAERQWVESSPKPMVSLLGSGRPTGSPLSAEFSGTRKDSPVLSCFPPSELQAPFHSHELSLAEPPDSLAPPSSQAFLGFGTAPVGSGLPPEEDLGALLANSHGASPTPSIPLTATGAADNGFLSHNFLTVAPGHSSHHSPGLQGQGVTLPGQPPLPEKKRASEGDRSLGSVSPSSSGFSSPHSGSTISIPFPNVLPDFSKASEAASPLPDSPGDKLVIVKFVQDTSKFWYKADISREQAIAMLKDKEPGSFIVRDSHSFRGAYGLAMKVATPPPSVLQLNKKAGDLANELVRHFLIECTPKGVRLKGCSNEPYFGSLTALVCQHSITPLALPCKLLIPERDPLEEIAESSPQTAANSAAELLKQGAACNVWYLNSVEMESLTGHQAIQKALSITLVQEPPPVSTVVHFKVSAQGITLTDNQRKLFFRRHYPVNSVIFCALDPQDRKWIKDGPSSKVFGFVARKQGSATDNVCHLFAEHDPEQPASAIVNFVSKVMIGSPKKV

SEQ ID NO: 37437 - protein, 1249 aa, Homo sapiens
  REGION 1..1249: note = ENSP00000414358
MNWLCRNQDPNPPPQPEELTSSLHAFKNKAFKKSKVCGVCKQIIDGQGISCRACKYSCHKKCEAKVVIPCGVQVRLEQAPGSSTLSSSLCRDKPLRPVILSPTMEEGHGLDLTYITERIIAVSFPAGCSEESYLHNLQEVTRMLKSKHGDNYLVLNLSEKRYDLTKLNPKIMDVGWPELHAPPLDKMCTICKAQESWLNSNLQHVVVIHCRGGKGRIGVVISSYMHFTNVSASADQALDRFAMKKFYDDKVSALMQPSQKRYVQFLSGLLSGSVKMNASPLFLHFVILHGTPNFDTGGVCRPFLKLYQAMQPVYTSGIYNVGPENPSRICIVIEPAQLLKGDVMVKCYHKKYRSATRDVIFRLQFHTGAVQGYGLVFGKEDLDNASKDDRFPDYGKVELVFSATPEKIQGSEHLYNDHGVIVDYNTTDPLIRWDSYENLSADGEVLHTQGPVDGSLYAKVRKKSSSDPGIPGGPQAIPATNSPDHSDHTLSVSSDSGHSTASARTDKTEERLAPGTRRGLSAQEKAELDQLLSGFGLEDPGSSLKEMTDARSKYSGTRHVVPAQVHVNGDAALKDRETDILDDEMPHHDLHSVDSLGTLSSSEGPQSAHLGPFTCHKSSQNSLLSDGFGSNVGEDPQGTLVPDLGLGMDGPYERERTFGSREPKQPQPLLRKPSVSAQMQAYGQSSYSTQTWVRQQQMVVAHQYSFAPDGEARLVSRCPADNPGLVQAQPRVPLTPTRGTSSRVAVQRGVGSGPHPPDTQQPSPSKAFKPRFPGDQVVNGAGPELSTGPSPGSPTLDIDQSIEQLNRLILELDPTFEPIPTHMNALGSQANGSVSPDSVGGGLRASSRLPDTGEGPSRATGRQGSSAEQPLGGRLRKLSLGQYDNDAGGQLPFSKCAWGKAGVDYAPNLPPFPSPADVKETMTPGYPQDLDIIDGRILSSKESMCSTPAFPVSPETPYVKTALRHPPFSPPEPPLSSPASQHKGGREPRSCPETLTHAVGMSESPIGPKSTMLRADASSTPSFQQAFASSCTISSNGPGQRRESSSSAERQWVESSPKPMVSLLGSGRPTGSPLSAEFSGTRKDSPVLSCFPPSELQAPFHSHELSLAEPPDSLAPPSSQAFLGFGTAPVGSGLPPEEDLGALLANSHGASPTPSIPLTATGAADNGFLSHNFLTVAPGHSSHHSPGLQGQGVTLPGQPPLPEKKRASEGDRSLGSVSPSSSGFSSPHSGSTISIPFPNVLPDFSKASE

SEQ ID NO: 37438 - protein, 544 aa, Homo sapiens
  REGION 1..544: note = ENSP00000396914
MPEELTSSLHAFKNKAFKKSKVCGVCKQIIDGQGISCRACKYSCHKKCEAKVVIPCGVQVRLEQAPGSSTLSSSLCRDKPLRPVILSPTMEEGHGLDLTYITERIIAVSFPAGCSEESYLHNLQEVTRMLKSKHGDNYLVLNLSEKRYDLTKLNPKIMDVGWPELHAPPLDKMCTICKAQESWLNSNLQHVVVIHCRGGKGRIGVVISSYMHFTNVSASADQALDRFAMKKFYDDKVSALMQPSQKRYVQFLSGLLSGSVKMNASPLFLHFVILHGTPNFDTGGVCRPFLKLYQAMQPVYTSGIYNVGPENPSRICIVIEPAQLLKGDVMVKCYHKKYRSATRDVIFRLQFHTGAVQGYGLVFGKEDLDNASKDDRFPDYGKVELVFSATPEKIQGSEHLYNDHGVIVDYNTTDPLIRWDSYENLSADGEVLHTQGPVDGSLYAKVRKKSSSDPGIPGGPQAIPATNSPDHSDHTLSVSSDSGHSTASARTDKTEERLAPGTRRGLSAQEKAELDQLLSGFGLEDPGSSLKEMTDARSKYSGTR

SEQ ID NO: 37439 - protein, 250 aa, Homo sapiens
  REGION 1..250: note = ENSP00000389285
MEEGHGLDLTYITERIIAVSFPAGCSEESYLHNLQEVTRMLKSKHGDNYLVLNLSEKRYDLTKLNPKIMDVGWPELHAPPLDKMCTICKAQESWLNSNLQHVVVIHCRGGKGRIGVVISSYMHFTNVSASADQALDRFAMKKFYDDKVSALMQPSQKRYVQFLSGLLSGSVKMNASPLFLHFVILHGTPNFDTGGVCRPFLKLYQAMQPVYTSGIYNVGPENPSRICIVIEPAQLLKGDVMVMNYNIANI

SEQ ID NO: 37440 - protein, 138 aa, Homo sapiens
  REGION 1..138: note = ENSP00000409415
MEEGHGLDLTYITERIIAVSFPAGCSEESYLHNLQEVTRMLKSKHGDNYLVLNLSEKRYDLTKLNPKIMDVGWPELHAPPLDKMCTICKAQESWLNSNLQHVVVIHCRGGKGRIGVVISSYMHFTNVSASADQALDRF

SEQ ID NO: 37441 - protein, 108 aa, Homo sapiens
  REGION 1..108: note = ENSP00000388142
MEEGHGLDLTYITERIIAVSFPAGCSEESYLHNLQEVTRMLKSKHGDNYLVLNLSEKRYDLTKLNPKIMDVGWPELHAPPLDKMCTICKAQESWLNSNLQHVVVIHCR

SEQ ID NO: 37442 - protein, 114 aa, Homo sapiens
  REGION 1..114: note = ENSP00000407464
MCSRQRSGFGCITNWWKMGTRHPAHPAQPEELTSSLHAFKNKAFKKSKVCGVCKQIIDGQGISCRACKYSCHKKCEAKVVIPCGVQVRLEQAPGSSTLSSSLCRDKPLRPVILS

SEQ ID NO: 37443 - protein, 250 aa, Homo sapiens; identical to SEQ ID NO: 37439
  REGION 1..250: note = ENSP00000388318

SEQ ID NO: 37444 - protein, 345 aa, Homo sapiens
  REGION 1..345: note = ENSP00000427695
MQLEIQVALNFIISYLYNKLPRRRVNIFGEELERLLKKKYEGHWYPEKPYKGSGFRCIHIGEKVDPVIEQASKESGLDIDDVRGNLPQDLSVWIDPFEVSYQIGEKGPVKVLYVDDNNENGCELDKEIKNSFNPEAQVFMPISDPASSVSSSPSPPFGHSAAVSPTFMPRSTQPLTFTTATFAATKFGSTKMKNSGRSNKVARTSPINLGLNVNDLLKQKAISSSMHSLYGLGLGSQQQPQQQQQPAQPPPPPPPPQQQQQQKTSALSPNAKEFIFPNMQGQGSSTNGMFPGDSPLNLSPLQYSNAFDVFAAYGGLNEKSFVDGLNFSLNNMQYSNQQFQPVMAN

SEQ ID NO: 37445 - protein, 345 aa, Homo sapiens; identical to SEQ ID NO: 37444
  REGION 1..345: note = ENSP00000268957

SEQ ID NO: 37446 - protein, 346 aa, Homo sapiens
  REGION 1..346: note = ENSP00000458553
MAFGKSHRDPYATSVGHLIEKATFAGVQTEDWGQFMHICDIINTTQDGPKDAVKALKKRISKNYNHKEIQLTLSLIDMCVQNCGPSFQSLIVKKEFVKENLVKLLNPRYNLPLDIQNRILNFIKTWSQGFPGGVDVSEVKEVYLDLVKKGVQFPPSEAEAETARQETAQISSNPPTSVPTAPALSSVIAPKNSTVTLVPEQIGKLHSELDMVKMNVRVMSAILMENTPGSENHEDIELLQKLYKTGREMQERIMDLLVVVENEDVTVELIQVNEDLNNAILGYERFTRNQQRILEQNKNQKEATNTTSEPSAPSQDLLDLSPSPRMPRATLGELNTMNNQLSGLSK

SEQ ID NO: 37447 - protein, 476 aa, Homo sapiens
  REGION 1..476: note = ENSP00000460823
MAFGKSHRDPYATSVGHLIEKATFAGVQTEDWGQFMHICDIINTTQDGPKDAVKALKKRISKNYNHKEIQLTLSLIDMCVQNCGPSFQSLIVKKEFVKENLVKLLNPRYNLPLDIQNRILNFIKTWSQGFPGGVDVSEVKEVYLDLVKKGVQFPPSEAEAETARQETAQISSNPPTSVPTAPALSSVIAPKNSTVTLVPEQIGKLHSELDMVKMNVRVMSAILMENTPGSENHEDIELLQKLYKTGREMQERIMDLLVVVENEDVTVELIQVNEDLNNAILGYERFTRNQQRILEQNKNQKEATNTTSEPSAPSQDLLDLSPSPRMPRATLGELNTMNNQLSGLNFSLPSSDVTNNLKPSLHPQMNLLALENTEIPPFAQRTSQNLTSSHAYDNFLEHSNSVFLQPVSLQTIAAAPSNQSLPPLPSNHPAMTKSDLQPPNYYEVMEFDPLAPAVTTEAIYEEIDAHQHKGAQNDGD

SEQ ID NO: 37448 - protein, 38 aa, Homo sapiens
  REGION 1..38: note = ENSP00000459079
MAFGKSHRDPYATSVGHLIAQTQQLFLGRKGYICWSSD

SEQ ID NO: 37449 - protein, 465 aa, Homo sapiens
  REGION 1..465: note = ENSP00000408958
MAFGKSHRDPYATSVGHLIEKATFAGVQTEDWGQFMHICDIINTTQDGPKDAVKALKKRISKNYNHKEIQLTLSLIDMCVQNCGPSFQSLIVKKEFVKENLVKLLNPRYNLPLDIQNRILNFIKTWSQGFPGGVDVSEVKEVYLDLVKKGVQFPPSEAEAETARQETAQISSNPPTSVPTAPALSSVIAPKNSTVTLVPEQIGKLHSELDMVKMNVRVMSAILMENTPGSENHEDIELLQKLYKTGREMQERIMDLLVVVENEDVTVELIQVNEDLNNAILGYERFTRNQQRILEQNKNQKEATNTTSEPSAPSQDLLDLSPSPRMPRATLGELNTMNNQLSGLNFSLPSSDVTNNLKPSLHPQMNLLALENTEIPPFAQRTSQNLTSSHAYDNPVSLQTIAAAPSNQSLPPLPSNHPAMTKSDLQPPNYYEVMEFDPLAPAVTTEAIYEEIDAHQHKGAQNDGD

SEQ ID NO: 37450 - protein, 399 aa, Homo sapiens
  REGION 1..399: note = ENSP00000343901
MCVQNCGPSFQSLIVKKEFVKENLVKLLNPRYNLPLDIQNRILNFIKTWSQGFPGGVDVSEVKEVYLDLVKKGVQFPPSEAEAETARQETAQISSNPPTSVPTAPALSSVIAPKNSTVTLVPEQIGKLHSELDMVKMNVRVMSAILMENTPGSENHEDIELLQKLYKTGREMQERIMDLLVVVENEDVTVELIQVNEDLNNAILGYERFTRNQQRILEQNKNQKEATNTTSEPSAPSQDLLDLSPSPRMPRATLGELNTMNNQLSGLNFSLPSSDVTNNLKPSLHPQMNLLALENTEIPPFAQRTSQNLTSSHAYDNFLEHSNSVFLQPVSLQTIAAAPSNQSLPPLPSNHPAMTKSDLQPPNYYEVMEFDPLAPAVTTEAIYEEIDAHQHKGAQNDGD

SEQ ID NO: 37451 - protein, 225 aa, Homo sapiens
  REGION 1..225: note = ENSP00000460721
MHICDIINTTQDGPKDAVKALKKRISKNYNHKEIQLTLSLIDMCVQNCGPSFQSLIVKKEFVKENLVKLLNPRYNLPLDIQNRILNFIKTWSQGFPGGVDVSEVKEVYLDLVKKGVQFPPSEAEAETARQETAQISSNPPTSVPTAPALSSVIAPKNSTVTLVPEQIGKLHSELDMVKMNVRVMSAILMENTPGSENHEDIELLQVLYDFRDYQSKCLLKLFSKL

SEQ ID NO: 37452 - protein, 326 aa, Homo sapiens
  REGION 1..326: note = ENSP00000461876
MCVQNCGPSFQSLIVKKEFVKENLVKLLNPRYNLPLDIQNRILNFIKTWSQGFPGGVDVSEVKEVYLDLVKKGVQFPPSEAEAETARQETAQISSNPPTSVPTAPALSSVIAPKNSTVTLVPEQIGKLHSELDMVKMNVRVMSAILMENTPGSENHEDIELLQKLYKTGREMQERIMDLLVVVENEDVTVELIQVNEDLNNAILGYERFTRNQQRILEQNKNQKEATNTTSEPSAPSQDLLDLSPSPRMPRATLGELNTMNNQLSGLNFSLPSSDVTNNLKPSLHPQMNLLALENTEIPPRDLVLPCWPGCGLKLLTYGDLPTSAS

SEQ ID NO: 37453 - protein, 469 aa, Homo sapiens
  REGION 1..469: note = ENSP00000461284
MAFGKSHRDPYATSVGHLIEKATFAGVQTEDWGQFMHICDIINTTQDGPKDAVKALKKRISKNYNHKEIQLTLSNCGPSFQSLIVKKEFVKENLVKLLNPRYNLPLDIQNRILNFIKTWSQGFPGGVDVSEVKEVYLDLVKKGVQFPPSEAEAETARQETAQISSNPPTSVPTAPALSSVIAPKNSTVTLVPEQIGKLHSELDMVKMNVRVMSAILMENTPGSENHEDIELLQKLYKTGREMQERIMDLLVVVENEDVTVELIQVNEDLNNAILGYERFTRNQQRILEQNKNQKEATNTTSEPSAPSQDLLDLSPSPRMPRATLGELNTMNNQLSGLNFSLPSSDVTNNLKPSLHPQMNLLALENTEIPPFAQRTSQNLTSSHAYDNFLEHSNSVFLQPVSLQTIAAAPSNQSLPPLPSNHPAMTKSDLQPPNYYEVMEFDPLAPAVTTEAIYEEIDAHQHKGAQNDGD

SEQ ID NO: 37454 - protein, 106 aa, Homo sapiens
  REGION 1..106: note = ENSP00000459003
MCVQNCGPSFQSLIVKKEFVKENLVKLLNPRYNLPLDIQNRILNFIKTWSQGFPGGVDVSEVKEVYLDLVKKGVQFPPSEAEAETARQETAQISSNPPTSVPTAPA

SEQ ID NO: 37455 - protein, 399 aa, Homo sapiens; identical to SEQ ID NO: 37450
  REGION 1..399: note = ENSP00000443099

SEQ ID NO: 37456 - protein, 63 aa, Homo sapiens
  REGION 1..63: note = ENSP00000458219
MAFGKSHRDPYATSVGHLIEKATFAGVQTEDWGQFMHICDIINTTQDGLLTCVCRTVVQVSSL

SEQ ID NO: 37457 - protein, 346 aa, Homo sapiens; identical to SEQ ID NO: 37446
  REGION 1..346: note = ENSP00000458918

SEQ ID NO: 37458 - protein, 92 aa, Homo sapiens
  REGION 1..92: note = ENSP00000460565
MAFGKSHRDPYATSVGHLIEKATFAGVQTEDWGQFMHICDIINTTQDGPKDAVKALKKRISKNYNHKEIQLTLSSRCLLTCVCRTVVQVSSL

SEQ ID NO: 37459 - protein, 199 aa, Homo sapiens
  REGION 1..199: note = ENSP00000461215
  VARIANT 1: note = Any amino acid
XFGKSHRDPYATSVGHLIEKATFAGVQTEDWGQFMHICDIINTTQDGPKDAVKALKKRISKNYNHKEIQLTLSLIDMCVQNCGPSFQSLIVKKEFVKENLVKLLNPRYNLPLDIQNRILNFIKTWSQGFPGGVDVSEVKEVYLDLVKKGVQFPPSEAEAETARQEIGKLHSELDMVKMNVRVMSAILMENTPGSENHED

SEQ ID NO: 37460 - protein, 252 aa, Homo sapiens
  REGION 1..252: note = ENSP00000458809
  VARIANT 1: note = Any amino acid
XKSHRDPYATSVGHLIEKATFAGVQTEDWGQFMHICDIINTTQDGPKDAVKALKKRISKNYNHKEIQLTLSTWSQGFPGGVDVSEVKEVYLDLVKKGVQFPPSEAEAETARQETAQISSNPPTSVPTAPALSSVIAPKNSTVTLVPEQIGKLHSELDMVKMNVRVMSAILMENTPGSENHEDIELLQKLYKTGREMQERIMDLLVVVENEDVTVELIQVNEDLNNAILGYERFTRNQQRILEQNKNQKEATN

SEQ ID NO: 37461 - protein, 122 aa, Homo sapiens
  REGION 1..122: note = ENSP00000461396
MHICDIINTTQDGPKDAVKALKKRISKNYNHKEIQLTLSLIDMCVQNCGPSFQSLIVKKEFVKENLVKLLNPRYNLPLDIQNRILNFIKTWSQGFPGGVDVSEVKEVYLDLVKKGVQFPPSE

SEQ ID NO: 37462 - protein, 229 aa, Homo sapiens
  REGION 1..229: note = ENSP00000460213
MPPGEWNQTEKATFAGVQTEDWGQFMHICDIINTTQDGPKDAVKALKKRISKNYNHKEIQLTLSLIDMCVQNCGPSFQSLIVKKEFVKENLVKLLNPRYNLPLDIQNRILNFIKTWSQGFPGGVDVSEVKEVYLDLVKKGVQFPPSEAEAETARQETAQISSNPPTSVPTAPALSSVIAPKNSTVTLVPEQIGKLHSELDMVKMNVRVMSAILMENTPGSENHEDIELL

SEQ ID NO: 37463 - protein, 125 aa, Homo sapiens
  REGION 1..125: note = ENSP00000467227
  VARIANT 1: note = Any amino acid
XFSLPSSDVTNNLKPSLHPQMNLLALENTEIPPFAQRTSQNLTSSHAYDNFLEHSNSVFLQPVSLQTIAAAPSNQSLPPLPSNHPAMTKSDLQPPNYYEVMEFDPLAPAVTTEYIFQLQTYVRRI

SEQ ID NO: 37464 - protein, 765 aa, Homo sapiens
  REGION 1..765: note = ENSP00000354522
MSGDHLHNDSQIEADFRLNDSHKHKDKHKDREHRHKEHKKEKDREKSKHSNSEHKDSEKKHKEKEKTKHKDGSSEKHKDKHKDRDKEKRKEEKVRASGDAKIKKEKENGFSSPPQIKDEPEDDGYFVPPKEDIKPLKRPRDEDDADYKPKKIKTEDTKKEKKRKLEEEEDGKLKKPKNKDKDKKVPEPDNKKKKPKKEEEQKWKWWEEERYPEGIKWKFLEHKGPVFAPPYEPLPENVKFYYDGKVMKLSPKAEEVATFFAKMLDHEYTTKEIFRKNFFKDWRKEMTNEEKNIITNLSKCDFTQMSQYFKAQTEARKQMSKEEKLKIKEENEKLLKEYGFCIMDNHKERIANFKIEPPGLFRGRGNHPKMGMLKRRIMPEDIIINCSKDAKVPSPPPGHKWKEVRHDNKVTWLVSWTENIQGSIKYIMLNPSSRIKGEKDWQKYETARRLKKCVDKIRNQYREDWKSKEMKVRQRAVALYFIDKLALRAGNEKEEGETADTVGCCSLRVEHINLHPELDGQEYVVEFDFLGKDSIRYYNKVPVEKRVFKNLQLFMENKQPEDDLFDRLNTGILNKHLQDLMEGLTAKVFRTYNASITLQQQLKELTAPDENIPAKILSYNRANRAVAILCNHQRAPPKTFEKSMMNLQTKIDAKKEQLADARRDLKSAKADAKVMKDAKTKKVVESKKKAVQRLEEQLMKLEVQATDREENKQIALGTSKLNYLDPRITVAWCKKWGVPIEKIYNKTQREKFAWAIDMADEDYEF

SEQ ID NO: 37465 - protein, 506 aa, Homo sapiens
  REGION 1..506: note = ENSP00000344724
MDVRLYPSAPAVGARPGAEPAGLAHLDYYHGGKFDGDSAYVGMSDGNPELLSTSQTYNGQSENNEDYEIPPITPPNLPEPSLLHLGDHEASYHSLCHGLTPNGLLPAYSYQAMDLPAIMVSNMLAQDSHLLSGQLPTIQEMVHSEVAAYDSGRPGPLLGRPAMLASHMSALSQSQLISQMGIRSSIAHSSPSPPGSKSATPSPSSSTQEEESEVHFKISGEKRPSADPGKKAKNPKKKKKKDPNEPQKPVSAYALFFRDTQAAIKGQNPSATFGDVSKIVASMWDSLGEEQKQAYKRKTEAAKKEYLKALAAYRASLVSKSSPDQGETKSTQANPPAKMLPPKQPMYAMPGLASFLTPSDLQAFRSGASPASLARTLGSKSLLPGLSASPPPPPSFPLSPTLHQQLSLPPHAQGALLSPPVSMSPAPQPPVLPTPMALQVQLAMSPSPPGPQDFPHISEFPSSSGSCSPGPSNPTSSGDWDSSYPSGECGISTCSLLPRDKSLYLT

SEQ ID NO: 37466 - protein, 464 aa, Homo sapiens
  REGION 1..464: note = ENSP00000390278
MSDGNPELLSTSQTYNGQSENNEDYEIPPITPPNLPEPSLLHLGDHEASYHSLCHGLTPNGLLPAYSYQAMDLPAIMVSNMLAQDSHLLSGQLPTIQEMVHSEVAAYDSGRPGPLLGRPAMLASHMSALSQSQLISQMGIRSSIAHSSPSPPGSKSATPSPSSSTQEEESEVHFKISGEKRPSADPGKKAKNPKKKKKKDPNEPQKPVSAYALFFRDTQAAIKGQNPSATFGDVSKIVASMWDSLGEEQKQAYKRKTEAAKKEYLKALAAYRASLVSKSSPDQGETKSTQANPPAKMLPPKQPMYAMPGLASFLTPSDLQAFRSGASPASLARTLGSKSLLPGLSASPPPPPSFPLSPTLHQQLSLPPHAQGALLSPPVSMSPAPQPPVLPTPMALQVQLAMSPSPPGPQDFPHISEFPSSSGSCSPGPSNPTSSGDWDSSYPSGECGISTCSLLPRDKSLYLT

SEQ ID NO: 37467 - protein, 464 aa, Homo sapiens; identical to SEQ ID NO: 37466
  REGION 1..464: note = ENSP00000362090

SEQ ID NO: 37468 - protein, 488 aa, Homo sapiens
  REGION 1..488: note = ENSP00000350849
MQQTRTEAVAGAFSRCLGFCGMRLGLLLLARHWCIAGVFPQKFDGDSAYVGMSDGNPELLSTSQTYNGQSENNEDYEIPPITPPNLPEPSLLHLGDHEASYHSLCHGLTPNGLLPAYSYQAMDLPAIMVSNMLAQDSHLLSGQLPTIQEMVHSEVAAYDSGRPGPLLGRPAMLASHMSALSQSQLISQMGIRSSIAHSSPSPPGSKSATPSPSSSTQEEESEVHFKISGEKRPSADPGKKAKNPKKKKKKDPNEPQKPVSAYALFFRDTQAAIKGQNPSATFGDVSKIVASMWDSLGEEQKQSSPDQGETKSTQANPPAKMLPPKQPMYAMPGLASFLTPSDLQAFRSGASPASLARTLGSKSLLPGLSASPPPPPSFPLSPTLHQQLSLPPHAQGALLSPPVSMSPAPQPPVLPTPMALQVQLAMSPSPPGPQDFPHISEFPSSSGSCSPGPSNPTSSGDWDSSYPSGECGISTCSLLPRDKSLYLT

SEQ ID NO: 37469 - protein, 196 aa, Homo sapiens
  REGION 1..196: note = ENSP00000390876
RRRRKRRTPMSRRSLCRPTHSSSETLRPPSRVRTPVPLSVTCPKSWPPCGTAWERNRSRTSRTSLSSPAARDPAHLAHPTPPAAGTGTAATPVGSVASAPAACSPGTNRSTSPNPASLPSLRLAGRHCSEPEGLTAEKRPWPEAGWPIGESSDTPIARGLSLFLNLPPDSAEAAHCPPPAQRTCRNLPPADLLAPG

SEQ ID NO: 37470 - protein, 571 aa, Homo sapiens
  REGION 1..571: note = ENSP00000385705
MKCQPRSGARRIEERLHYLITTYLKFGNNNNYMNMAEANNAFFAASETFHTPSLGDEEFEIPPITPPPESDPALGMPDVLLPFQALSDPLPSQGSEFTPQFPPQSLDLPSITISRNLVEQDGVLHSSGLHMDQSHTQVSQYRQDPSLIMRSIVHMTDAARSGVMPPAQLTTINQSQLSAQLGLNLGGASMPHTSPSPPASKSATPSPSSSINEEDADEANRAIGEKRAAPDSGKKPKTPKKKKKKDPNEPQKPVSAYALFFRDTQAAIKGQNPNATFGEVSKIVASMWDSLGEEQKQVYKRKTEAAKKEYLKALAAYRASLVSKAAAESAEAQTIRSVQQTLASTNLTSSLLLNTPLSQHGTVSASPQTLQQSLPRSIAPKPLTMRLPMNQIVTSVTIAANMPSNIGAPLISSMGTTMVGSAPSTQVSPSVQTQQHQMQLQQQQQQQQQQMQQMQQQQLQQHQMHQQIQQQMQQQHFQHHMQQHLQQQQQHLQQQINQQQLQQQLQQRLQLQQLQHMQHQSQPSPRQHSPVASQITSPIPAIGSPQPASQQHQSQIQSQTQTQVLSQVSIF

SEQ ID NO: 37471 - protein, 576 aa, Homo sapiens
  REGION 1..576: note = ENSP00000219746
MDVRFYPAAAGDPASLDFAQCLGYYGYSKFGNNNNYMNMAEANNAFFAASEQTFHTPSLGDEEFEIPPITPPPESDPALGMPDVLLPFQALSDPLPSQGSEFTPQFPPQSLDLPSITISRNLVEQDGVLHSSGLHMDQSHTQVSQYRQDPSLIMRSIVHMTDAARSGVMPPAQLTTINQSQLSAQLGLNLGGASMPHTSPSPPASKSATPSPSSSINEEDADEANRAIGEKRAAPDSGKKPKTPKKKKKKDPNEPQKPVSAYALFFRDTQAAIKGQNPNATFGEVSKIVASMWDSLGEEQKQVYKRKTEAAKKEYLKALAAYRASLVSKAAAESAEAQTIRSVQQTLASTNLTSSLLLNTPLSQHGTVSASPQTLQQSLPRSIAPKPLTMRLPMNQIVTSVTIAANMPSNIGAPLISSMGTTMVGSAPSTQVSPSVQTQQHQMQLQQQQQQQQQQMQQMQQQQLQQHQMHQQIQQQMQQQHFQHHMQQHLQQQQQHLQQQINQQQLQQQLQQRLQLQQLQHMQHQSQPSPRQHSPVASQITSPIPAIGSPQPASQQHQSQIQSQTQTQVLSQVSIF

SEQ ID NO: 37472 - protein, 166 aa, Homo sapiens
  REGION 1..166: note = ENSP00000457401
MNMAEANNAFFAASEQTFHTPSLGDEEFEIPPITPPPESDPALGMPDVLLPFQALSDPLPSQGSEFTPQFPPQSLDLPSITISRNLVEQDGVLHSSGLHMDQSHTQVSQYRQDPSLIMRSIVHMTDAARSGVMPPAQLTTINQSQLSAQLGLNLGGASMPHTSPSP

SEQ ID NO: 37473 - protein, 60 aa, Homo sapiens
  REGION 1..60: note = ENSP00000463843
MDVRFYPAAAGDPASLDFAQCLGYYGYSKHFACRLESVLFIAVCAQPRKAPIPSTQPPST

SEQ ID NO: 37474 - protein, 220 aa, Homo sapiens
  REGION 1..220: note = ENSP00000363943
MFQRLSSLFFSTPSPPEDPDCPRAFVSEEDEVDGWLIIDLPDSYAAPPSPGAAPAPAGRPPPAPSLMDESWFVTPPACFTAEGPGLGPARLQSSPLEDLLIEHPSMSVYVTGSTIVLEPGSPSPLPDAALPDGDLSEGELTPARREPRAARHAAPLPARAALLEKAGQVRRLQRARQRAERHALSAKAVQRQNRARESRPRRSKNQSSFIYQPCQRQFNY

SEQ ID NO: 37475 - protein, 220 aa, Homo sapiens; identical to SEQ ID NO: 37474
  REGION 1..220: note = ENSP00000363942

SEQ ID NO: 37476 - protein, 88 aa, Homo sapiens
  REGION 1..88: note = ENSP00000395784
MFQRLSSLFFSTPSPPEDPDCPRAFVSEEDEVDGWLIIDLPEGPGLGPARLQSSPLEDLLIEHPSMSVYVTGSTIVLEPGSPSPLPDA

SEQ ID NO: 37477 - protein, 77 aa, Homo sapiens
  REGION 1..77: note = ENSP00000404410
MFQRLSSLFFSTPSPPEDPDCPRAFVSEEDEVDGWLIIDLPDSYAAPPSPGAAPAPAGRPPPAPSLMDESWFVTPPA

SEQ ID NO: 37478 - protein, 636 aa, Homo sapiens
  REGION 1..636: note = ENSP00000367545
MAQSTATSPDGGTTFEHLWSSLEPDSTYFDLPQSSRGNNEVVGGTDSSMDVFHLEGMTTSVMAQFNLLSSTMDQMSSRAASASPYTPEHAASVPTHSPYAQPSSTFDTMSPAPVIPSNTDYPGPHHFEVTFQQSSTAKSATWTYSPLLKKLYCQIAKTCPIQIKVSTPPPPGTAIRAMPVYKKAEHVTDVVKRCPNHELGRDFNEGQSAPASHLIRVEGNNLSQYVDDPVTGRQSVVVPYEPPQVGTEFTTILYNFMCNSSCVGGMNRRPILIIITLEMRDGQVLGRRSFEGRICACPGRDRKADEDHYREQQALNESSAKNGAASKRAFKQSPPAVPALGAGVKKRRHGDEDTYYLQVRGRENFEILMKLKESLELMELVPQPLVDSYRQQQQLLQRPSHLQPPSYGPVLSPMNKVHGGMNKLPSVNQLVGQPPPHSSAATPNLGPVGPGMLNNHGHAVPANGEMSSSHSAQSMVSGSHCTPPPPYHADPSLVSFLTGLGCPNCIEYFTSQGLQSIYHLQNLTIEDLGALKIPEQYRMTIWRGLQDLKQGHDYSTAQQLLRSSNAATISIGGSGELQRQRVMEAVHFRVRHTITIPNRGGPGGGPDEWADFGFDLPDCKARKQPIKEEFTEAEIH

SEQ ID NO: 37479 - protein, 403 aa, Homo sapiens
  REGION 1..403: note = ENSP00000475143
MAQSTATSPDGGTTFEHLWSSLEPDSTYFDLPQSSRGNNEVVGGTDSSMDVFHLEGMTTSVMAQFNLLSSTMDQMSSRAASASPYTPEHAASVPTHSPYAQPSSTFDTMSPAPVIPSNTDYPGPHHFEVTFQQSSTAKSATWTYSPLLKKLYCQIAKTCPIQIKVSTPPPPGTAIRAMPVYKKAEHVTDVVKRCPNHELGRDFNEGQSAPASHLIRVEGNNLSQYVDDPVTGRQSVVVPYEPPQVGTEFTTILYNFMCNSSCVGGMNRRPILIIITLEMRDGQVLGRRSFEGRICACPGRDRKADEDHYREQQALNESSAKNGAASKRAFKQSPPAVPALGAGVKKRRHGDEDTYYLQVRGRENFEILMKLKESLELMELVPQPLVDSYRQQQQLLQRPTWGP

SEQ ID NO: 37480 - protein, 499 aa, Homo sapiens
  REGION 1..499: note = ENSP00000346423
MAQSTATSPDGGTTFEHLWSSLEPDSTYFDLPQSSRGNNEVVGGTDSSMDVFHLEGMTTSVMAQFNLLSSTMDQMSSRAASASPYTPEHAASVPTHSPYAQPSSTFDTMSPAPVIPSNTDYPGPHHFEVTFQQSSTAKSATWTYSPLLKKLYCQIAKTCPIQIKVSTPPPPGTAIRAMPVYKKAEHVTDVVKRCPNHELGRDFNEGQSAPASHLIRVEGNNLSQYVDDPVTGRQSVVVPYEPPQVGTEFTTILYNFMCNSSCVGGMNRRPILIIITLEMRDGQVLGRRSFEGRICACPGRDRKADEDHYREQQALNESSAKNGAASKRAFKQSPPAVPALGAGVKKRRHGDEDTYYLQVRGRENFEILMKLKESLELMELVPQPLVDSYRQQQQLLQRPSHLQPPSYGPVLSPMNKVHGGMNKLPSVNQLVGQPPPHSSAATPNLGPVGPGMLNNHGHAVPANGEMSSSHSAQSMVSGSHCTPPPPYHADPSLVRTWGP

SEQ ID NO: 37481 - protein, 555 aa, Homo sapiens
  REGION 1..555: note = ENSP00000474626
MAQSTATSPDGGTTFEHLWSSLEPDSTYFDLPQSSRGNNEVVGGTDSSMDVFHLEGMTTSVMAQFNLLSSTMDQMSSRAASASPYTPEHAASVPTHSPYAQPSSTFDTMSPAPVIPSNTDYPGPHHFEVTFQQSSTAKSATWTYSPLLKKLYCQIAKTCPIQIKVSTPPPPGTAIRAMPVYKKAEHVTDVVKRCPNHELGRDFNEGQSAPASHLIRVEGNNLSQYVDDPVTGRQSVVVPYEPPQVGTEFTTILYNFMCNSSCVGGMNRRPILIIITLEMRDGQVLGRRSFEGRICACPGRDRKADEDHYREQQALNESSAKNGAASKRAFKQSPPAVPALGAGVKKRRHGDEDTYYLQVRGRENFEILMKLKESLELMELVPQPLVDSYRQQQQLLQRPPRDAQQPWPRSASQRRDEQQPQRPVHGLGVPLHSATPLPRRPQPRQDLGALKIPEQYRMTIWRGLQDLKQGHDYSTAQQLLRSSNAATISIGGSGELQRQRVMEAVHFRVRHTITIPNRGGPGGGPDEWADFGFDLPDCKARKQPIKEEFTEAEIH

SEQ ID NO: 37482 - protein, 540 aa, Homo sapiens
  REGION 1..540: note = ENSP00000474322
MAQSTATSPDGGTTFEHLWSSLEPDSTYFDLPQSSRGNNEVVGGTDSSMDVFHLEGMTTSVMAQFNLLSSTMDQMSSRAASASPYTPEHAASVPTHSPYAQPSSTFDTMSPAPVIPSNTDYPGPHHFEVTFQQSSTAKSATWTYSPLLKKLYCQIAKTCPIQIKVSTPPPPGTAIRAMPVYKKAEHVTDVVKRCPNHELGRDFNEGQSAPASHLIRVEGNNLSQYVDDPVTGRQSVVVPYEPPQVGTEFTTILYNFMCNSSCVGGMNRRPILIIITLEMRDGQVLGRRSFEGRICACPGRDRKADEDHYREQQALNESSAKNGAASKRAFKQSPPAVPALGAGVKKRRHGDEDTYYLQVRGRENFEILMKLKESLELMELVPQPLVDSYRQQQQLLQRPFLTGLGCPNCIEYFTSQGLQSIYHLQNLTIEDLGALKIPEQYRMTIWRGLQDLKQGHDYSTAQQLLRSSNAATISIGGSGELQRQRVMEAVHFRVRHTITIPNRGGPGGGPDEWADFGFDLPDCKARKQPIKEEFTEAEIH

SEQ ID NO: 37483 - protein, 450 aa, Homo sapiens
  REGION 1..450: note = ENSP00000367534
MLYVGDPARHLATAQFNLLSSTMDQMSSRAASASPYTPEHAASVPTHSPYAQPSSTFDTMSPAPVIPSNTDYPGPHHFEVTFQQSSTAKSATWTYSPLLKKLYCQIAKTCPIQIKVSTPPPPGTAIRAMPVYKKAEHVTDVVKRCPNHELGRDFNEGQSAPASHLIRVEGNNLSQYVDDPVTGRQSVVVPYEPPQVGTEFTTILYNFMCNSSCVGGMNRRPILIIITLEMRDGQVLGRRSFEGRICACPGRDRKADEDHYREQQALNESSAKNGAASKRAFKQSPPAVPALGAGVKKRRHGDEDTYYLQVRGRENFEILMKLKESLELMELVPQPLVDSYRQQQQLLQRPSHLQPPSYGPVLSPMNKVHGGMNKLPSVNQLVGQPPPHSSAATPNLGPVGPGMLNNHGHAVPANGEMSSSHSAQSMVSGSHCTPPPPYHADPSLVRTWGP

SEQ ID NO: 37484 - protein, 426 aa, Homo sapiens
  REGION 1..426: note = ENSP00000367529
MLYVGDPARHLATAQFNLLSSTMDQMSSRAASASPYTPEHAASVPTHSPYAQPSSTFDTMSPAPVIPSNTDYPGPHHFEVTFQQSSTAKSATWTYSPLLKKLYCQIAKTCPIQIKVSTPPPPGTAIRAMPVYKKAEHVTDVVKRCPNHELGRDFNEGQSAPASHLIRVEGNNLSQYVDDPVTGRQSVVVPYEPPQVGTEFTTILYNFMCNSSCVGGMNRRPILIIITLEMRDGQVLGRRSFEGRICACPGRDRKADEDHYREQQALNESSAKNGAASKRAFKQSPPAVPALGAGVKKRRHGDEDTYYLQVRGRENFEILMKLKESLELMELVPQPLVDSYRQQQQLLQRPPRDAQQPWPRSASQRRDEQQPQRPVHGLGVPLHSATPLPRRPQPRQFFNRIGVSKLHRVFHLPRVTEHLPPAEPDH

SEQ ID NO: 37485 - protein, 587 aa, Homo sapiens
  REGION 1..587: note = ENSP00000367537
MLYVGDPARHLATAQFNLLSSTMDQMSSRAASASPYTPEHAASVPTHSPYAQPSSTFDTMSPAPVIPSNTDYPGPHHFEVTFQQSSTAKSATWTYSPLLKKLYCQIAKTCPIQIKVSTPPPPGTAIRAMPVYKKAEHVTDVVKRCPNHELGRDFNEGQSAPASHLIRVEGNNLSQYVDDPVTGRQSVVVPYEPPQVGTEFTTILYNFMCNSSCVGGMNRRPILIIITLEMRDGQVLGRRSFEGRICACPGRDRKADEDHYREQQALNESSAKNGAASKRAFKQSPPAVPALGAGVKKRRHGDEDTYYLQVRGRENFEILMKLKESLELMELVPQPLVDSYRQQQQLLQRPSHLQPPSYGPVLSPMNKVHGGMNKLPSVNQLVGQPPPHSSAATPNLGPVGPGMLNNHGHAVPANGEMSSSHSAQSMVSGSHCTPPPPYHADPSLVSFLTGLGCPNCIEYFTSQGLQSIYHLQNLTIEDLGALKIPEQYRMTIWRGLQDLKQGHDYSTAQQLLRSSNAATISIGGSGELQRQRVMEAVHFRVRHTITIPNRGGPGGGPDEWADFGFDLPDCKARKQPIKEEFTEAEIH

SEQ ID NO: 37486 - protein, 565 aa, Homo sapiens
  REGION 1..565: note = ENSP00000367539
MDQMSSRAASASPYTPEHAASVPTHSPYAQPSSTFDTMSPAPVIPSNTDYPGPHHFEVTFQQSSTAKSATWTYSPLLKKLYCQIAKTCPIQIKVSTPPPPGTAIRAMPVYKKAEHVTDVVKRCPNHELGRDFNEGQSAPASHLIRVEGNNLSQYVDDPVTGRQSVVVPYEPPQVGTEFTTILYNFMCNSSCVGGMNRRPILIIITLEMRDGQVLGRRSFEGRICACPGRDRKADEDHYREQQALNESSAKNGAASKRAFKQSPPAVPALGAGVKKRRHGDEDTYYLQVRGRENFEILMKLKESLELMELVPQPLVDSYRQQQQLLQRPSHLQPPSYGPVLSPMNKVHGGMNKLPSVNQLVGQPPPHSSAATPNLGPVGPGMLNNHGHAVPANGEMSSSHSAQSMVSGSHCTPPPPYHADPSLVSFLTGLGCPNCIEYFTSQGLQSIYHLQNLTIEDLGALKIPEQYRMTIWRGLQDLKQGHDYSTAQQLLRSSNAATISIGGSGELQRQRVMEAVHFRVRHTITIPNRGGPGGGPDEWADFGFDLPDCKARKQPIKEEFTEAEIH

SEQ ID NO: 37487 - protein, 555 aa, Homo sapiens; identical to SEQ ID NO: 37481
  REGION 1..555: note = ENSP00000350366

SEQ ID NO: 37488 - protein, 540 aa, Homo sapiens; identical to SEQ ID NO: 37482
  REGION 1..540: note = ENSP00000340740

SEQ ID NO: 37489 - protein, 748 aa, Homo sapiens
  REGION 1..748: note = ENSP00000376350
MNYQEAAIYLQEGENNDKFFTHPKDAKALAAYLFAHNHLFYLMELATALLLLLLSLCEAPAVPALRLGIYVHATLELFALMVVVFELCMKLRWLGLHTFIRHKRTMVKTSVLVVQFVEAIVVLVRQMSHVRVTRALRCIFLVDCRYCGGVRRNLRQIFQSLPPFMDILLLLLFFMIIFAILGFYLFSPNPSDPYFSTLENSIVSLFVLLTTANFPDVMMPSYSRNPWSCVFFIVYLSIELYFIMNLLLAVVFDTFNDIEKRKFKSLLLHKRTAIQHAYRLLISQRRPAGISYRQFEGLMRFYKPRMSARERYLTFKALNQNNTPLLSLKDFYDIYEVAALKWKAKKNREHWFDELPRTALLIFKGINILVKSKAFQYFMYLVVAVNGVWILVETFMLKGGNFFSKHVPWSYLVFLTIYGVELFLKVAGLGPVEYLSSGWNLFDFSVTVFAFLGLLALALNMEPFYFIVVLRPLQLLRLFKLKERYRNVLDTMFELLPRMASLGLTLLIFYYSFAIVGMEFFCGIVFPNCCNTSTVADAYRWRNHTVGNRTVVEEGYYYLNNFDNILNSFVTLFELTVVNNWYIIMEGVTSQTSHWSRLYFMTFYIVTMVVMTIIVAFILEAFVFRMNYSRKNQDSEVDGGITLEKEISKEELVAVLELYREARGASSDVTRLLETLSQMERYQQHSMVFLGRRSRTKSDLSLKMYQEEIQEWYEEHAREQEQQRQLSSSAAPAAQQPPGSRQRSQTVT

SEQ ID NO: 37490 - protein, 120 aa, Homo sapiens
  REGION 1..120: note = ENSP00000446767
MNYQEAAIYLQEGENNDKFFTHPKDAKALAAYLFAHNHLFYLMELATALLLLLLSLCEAPAVPALRLGIYVHATLELFALMVVVFELCMKLRWLGLHTFIRHKRTMVKTSVLVVQFVEAI

SEQ ID NO: 37491 - protein, 145 aa, Homo sapiens
  REGION 1..145: note = ENSP00000448561
MNYQEAAIYLQEGENNDKFFTHPKDAKALAAYLFAHNHLFYLMELATALLLLLLSLCEAPAVPALRLGIYVHATLELFALMVVVFELCMKLRWLGLHTFIRHKRTMVKTSVLVVQFVEAIVVLVRQMSHVRVTRALRCIFLVDCR

SEQ ID NO: 37492 - protein, 204 aa, Homo sapiens
  REGION 1..204: note = ENSP00000449564
  VARIANT 1: note = Any amino acid
XLLAVVFDTFNDIEKRKFKSLLLHKRTAIQHAYRLLISQRRPAGISYRQFEGLMRFYKPRMSARERYLTFKALNQNNTPLLSLKDFYDIYEVAALKWKAKKNREHWFDELPRTALLIFKGINILVKSKAFQYFMYLVVAVNGVWILVETFMLKVYGVELFLKVAGLGPVEYLSSGWNLFDFSVTVFAFLGLLALALNMEPFYFI

SEQ ID NO: 37493 - protein, 104 aa, Homo sapiens
  REGION 1..104: note = ENSP00000448010
  VARIANT 1: note = Any amino acid
XGGNFFSKHVPWSYLVFLTIYGVELFLKVAGLGPVEYLSSGWNLFDFSVTVFAFLGLLALALNMEPFYFIVVLRPLQLLRLFKLKERYRNVLDTMFELLPRMAR

SEQ ID NO: 37494 - protein, 888 aa, Homo sapiens
  REGION 1..888: note = ENSP00000438125
MESCYIAQAGLELLGSSSSPTLTSQSAEITEDASNGGVSEQHPWPSGFERELKPETISSPGYHILRATGEENMAVSLDDDVPLILTLDEGGSAPLAPSNGLGQEELPSKNGGSYAIHDSQAPSLSSGGESSPSSPAHNWEMNYQEAAIYLQEGENNDKFFTHPKDAKALAAYLFAHNHLFYLMELATALLLLLLSLCEAPAVPALRLGIYVHATLELFALMVVVFELCMKLRWLGLHTFIRHKRTMVKTSVLVVQFVEAIVVLVRQMSHVRVTRALRCIFLVDCRYCGGVRRNLRQIFQSLPPFMDILLLLLFFMIIFAILGFYLFSPNPSDPYFSTLENSIVSLFVLLTTANFPDVMMPSYSRNPWSCVFFIVYLSIELYFIMNLLLAVVFDTFNDIEKRKFKSLLLHKRTAIQHAYRLLISQRRPAGISYRQFEGLMRFYKPRMSARERYLTFKALNQNNTPLLSLKDFYDIYEVAALKWKAKKNREHWFDELPRTALLIFKGINILVKSKAFQYFMYLVVAVNGVWILVETFMLKGGNFFSKHVPWSYLVFLTIYGVELFLKVAGLGPVEYLSSGWNLFDFSVTVFAFLGLLALALNMEPFYFIVVLRPLQLLRLFKLKERYRNVLDTMFELLPRMASLGLTLLIFYYSFAIVGMEFFCGIVFPNCCNTSTVADAYRWRNHTVGNRTVVEEGYYYLNNFDNILNSFVTLFELTVVNNWYIIMEGVTSQTSHWSRLYFMTFYIVTMVVMTIIVAFILEAFVFRMNYSRKNQDSEVDGGITLEKEISKEELVAVLELYREARGASSDVTRLLETLSQMERYQQHSMVFLGRRSRTKSDLSLKMYQEEIQEWYEEHAREQEQQRQLSSSAAPAAQQPPGSRQRSQTVT

SEQ ID NO: 37495 - protein, 99 aa, Homo sapiens
  REGION 1..99: note = ENSP00000448704
MAVSLDDDVPLILTLDEGGSAPLAPSNGLGQEELPSKRRCCMLCSSKQKPWIPCRVISDVACKAASCFEGASGPCDISMWECYRVCKQMAAAMPSTTPR

SEQ ID NO: 37496 - protein, 816 aa, Homo sapiens
  REGION 1..816: note = ENSP00000335300
MAVSLDDDVPLILTLDEGGSAPLAPSNGLGQEELPSKNGGSYAIHDSQAPSLSSGGESSPSSPAHNWEMNYQEAAIYLQEGENNDKFFTHPKDAKALAAYLFAHNHLFYLMELATALLLLLLSLCEAPAVPALRLGIYVHATLELFALMVVVFELCMKLRWLGLHTFIRHKRTMVKTSVLVVQFVEAIVVLVRQMSHVRVTRALRCIFLVDCRYCGGVRRNLRQIFQSLPPFMDILLLLLFFMIIFAILGFYLFSPNPSDPYFSTLENSIVSLFVLLTTANFPDVMMPSYSRNPWSCVFFIVYLSIELYFIMNLLLAVVFDTFNDIEKRKFKSLLLHKRTAIQHAYRLLISQRRPAGISYRQFEGLMRFYKPRMSARERYLTFKALNQNNTPLLSLKDFYDIYEVAALKWKAKKNREHWFDELPRTALLIFKGINILVKSKAFQYFMYLVVAVNGVWILVETFMLKGGNFFSKHVPWSYLVFLTIYGVELFLKVAGLGPVEYLSSGWNLFDFSVTVFAFLGLLALALNMEPFYFIVVLRPLQLLRLFKLKERYRNVLDTMFELLPRMASLGLTLLIFYYSFAIVGMEFFCGIVFPNCCNTSTVADAYRWRNHTVGNRTVVEEGYYYLNNFDNILNSFVTLFELTVVNNWYIIMEGVTSQTSHWSRLYFMTFYIVTMVVMTIIVAFILEAFVFRMNYSRKNQDSEVDGGITLEKEISKEELVAVLELYREARGASSDVTRLLETLSQMERYQQHSMVFLGRRSRTKSDLSLKMYQEEIQEWYEEHAREQEQQRQLSSSAAPAAQQPPGSRQRSQTVT

SEQ ID NO: 37497 - protein, 107 aa, Homo sapiens
  REGION 1..107: note = ENSP00000449944
MNYQEAAIYLQEGENNDKFFTHPKDAKALAAYLFAHNHLFYLMELATALLLLLLSLCEAPAVPALRLGIYVHATLELFALMVVVFELCMKLRWLGLHTFIRHKRTMV

SEQ ID NO: 37498 - protein, 888 aa, Homo sapiens; identical to SEQ ID NO: 37494
  REGION 1..888: note = ENSP00000448083

SEQ ID NO: 37499 - protein, 126 aa, Homo sapiens
  REGION 1..126: note = ENSP00000447806
MERLGTPSGLDSTNGGSYAIHDSQAPSLSSGGESSPSSPAHNWEMNYQEAAIYLQEGENNDKFFTHPKDAKALAAYLFAHNHLFYLMELATALLLLLLSLCEAPAVPALRLGIYVHATLELFALMV

SEQ ID NO: 37500 - protein, 147 aa, Homo sapiens
  REGION 1..147: note = ENSP00000449560
MERLGTPSGLDSTKDASNGGVSEQHPWPSGFERELKPETISSPGYHILRATGEENMAVSLDDDVPLILTLDEGGSAPLAPSNGLGQEELPSKNGGSYAIHDSQAPSLSSGGESSPSSPAHNWEMNYQEAAIYLQEGENNDKFFTHPK

SEQ ID NO: 37501 - protein, 215 aa, Homo sapiens
  REGION 1..215: note = ENSP00000447569
MERLGTPSGLDSTKMESCYIAQAGLELLGSSSSPTLTSQSAEITEDASNGGVSEQHPWPSGFERELKPETISSPGYHILRATGEENMAVSLDDDVPLILTLDEGGSAPLAPSNGLGQEELPSKNGGSYAIHDSQAPSLSSGGESSPSSPAHNWEMNYQEAAIYLQEGENNDKFFTHPKDAKALAAYLFAHNHLFYLMELATALLLLLLSLCEAPA

SEQ ID NO: 37502 - protein, 85 aa, Homo sapiens
  REGION 1..85: note = ENSP00000447073
MAVSLDDDVPLILTLDEGGSAPLAPSNGLGQEELPSKNGGSYAIHDSQAPSLSSGGESSPSSPAHNWEMNYQEAAIYLQEGENND

SEQ ID NO: 37503 - protein, 124 aa, Homo sapiens
  REGION 1..124: note = ENSP00000447263
MESCYIAQAGLELLGSSSSPTLTSQSAEITEDASNGGVSEQHPWPSGFERELKPETISSPGYHILRATGEENMAVSLDDDVPLILTLDEGGSAPLAPSNGLGQEELPSKNGGSYAIHDSQAPSL

SEQ ID NO: 37504 - protein, 99 aa, Homo sapiens; identical to SEQ ID NO: 37495
  REGION 1..99: note = ENSP00000447181

SEQ ID NO: 37505 - protein, 248 aa, Homo sapiens
  REGION 1..248: note = ENSP00000357521
MAGITTIEAVKRKIQVLQQQADDAEERAERLQREVEGERRAREQAEAEVASLNRRIQLVEEELDRAQERLATALQKLEEAEKAADESERGMKVIENRALKDEEKMELQEIQLKEAKHIAEEADRKYEEVARKLVIIEGDLERTEERAELAESRCREMDEQIRLMDQNLKCLSAAEEKYSQKEDKYEEEIKILTDKLKEAETRAEFAERSVAKLEKTIDDLEDKLKCTKEEHLCTQRMLDQTLLDLNEM

SEQ ID NO: 37506 - protein, 248 aa, Homo sapiens
  REGION 1..248: note = ENSP00000339035
MAGITTIEAVKRKIQVLQQQADDAEERAERLQREVEGERRAREQAEAEVASLNRRIQLVEEELDRAQERLATALQKLEEAEKAADESERGMKVIENRALKDEEKMELQEIQLKEAKHIAEEADRKYEEVARKLVIIEGDLERTEERAELAESKCSELEEELKNVTNNLKSLEAQAEKYSQKEDKYEEEIKILTDKLKEAETRAEFAERSVAKLEKTIDDLEDKLKCTKEEHLCTQRMLDQTLLDLNEM

SEQ ID NO: 37507 - protein, 232 aa, Homo sapiens
  REGION 1..232: note = ENSP00000341653
MAGITTIEAVKRKIQVLQQQADDAEERAERLQREVEGERRAREQAEAEVASLNRRIQLVEEELDRAQERLATALQKLEEAEKAADEEKMELQEIQLKEAKHIAEEADRKYEEVARKLVIIEGDLERTEERAELAESRCREMDEQIRLMDQNLKCLSAAEEKYSQKEDKYEEEIKILTDKLKEAETRAEFAERSVAKLEKTIDDLEDKLKCTKEEHLCTQRMLDQTLLDLNEM

SEQ ID NO: 37508 - protein, 223 aa, Homo sapiens
  REGION 1..223: note = ENSP00000339378
MAGITTIEAVKRKIQVLQQQADDAEERAERLQREVEGESRAQERLATALQKLEEAEKAADESERGMKVIENRALKDEEKMELQEIQLKEAKHIAEEADRKYEEVARKLVIIEGDLERTEERAELAESRCREMDEQIRLMDQNLKCLSAAEEKYSQKEDKYEEEIKILTDKLKEAETRAEFAERSVAKLEKTIDDLEDKLKCTKEEHLCTQRMLDQTLLDLNEM

SEQ ID NO: 37509 - protein, 248 aa, Homo sapiens
  REGION 1..248: note = ENSP00000357520
MAGITTIEAVKRKIQVLQQQADDAEERAERLQREVEGERRAREQAEAEVASLNRRIQLVEEELDRAQERLATALQKLEEAEKAADESERGMKVIENRALKDEEKMELQEIQLKEAKHIAEEADRKYEEVARKLVIIEGDLERTEERAELAESRCREMDEQIRLMDQNLKCLSAAEEKYSQKEDKYEEEIKILTDKLKEAETRAEFAERSVAKLEKTIDDLEDELYAQKLKYKAISEELDHALNDMTSI

SEQ ID NO: 37510 - protein, 49 aa, Homo sapiens
  REGION 1..49: note = ENSP00000426521
MAGITTIEAVKRKIQVLQQQADDAEERAERLQREVEGERRAREQRYEGY

SEQ ID NO: 37511 - protein, 285 aa, Homo sapiens
  REGION 1..285: note = ENSP00000271850
MMEAIKKKMQMLKLDKENALDRAEQAEAEQKQAEERSKQLEDELAAMQKKLKGTEDELDKYSEALKDAQEKLELAEKKAADAEAEVASLNRRIQLVEEELDRAQERLATALQKLEEAEKAADESERGMKVIENRALKDEEKMELQEIQLKEAKHIAEEADRKYEEVARKLVIIEGDLERTEERAELAESRCREMDEQIRLMDQNLKCLSAAEEKYSQKEDKYEEEIKILTDKLKEAETRAEFAERSVAKLEKTIDDLEDKLKCTKEEHLCTQRMLDQTLLDLNEM

SEQ ID NO: 37512 - protein, 158 aa, Homo sapiens
  REGION 1..158: note = ENSP00000307712
MKVIENRALKDEEKMELQEIQLKEAKHIAEEADRKYEEVARKLVIIEGDLERTEERAELAESKCSELEEELKNVTNNLKSLEAQAEKYSQKEDKYEEEIKILTDKLKEAETRAEFAERSVAKLEKTIDDLEDKLKCTKEEHLCTQRMLDQTLLDLNEM

SEQ ID NO: 37513 - protein, 247 aa, Homo sapiens
  REGION 1..247: note = ENSP00000357517
MAGITTIEAVKRKIQVLQQQADDAEERAERLQREVEGERRAREQAEAEVASLNRRIQLVEEELDRAQERLATALQKLEEAEKAADESERGMKVIENRALKDEEKMELQEIQLKEAKHIAEEADRKYEEVARKLVIIEGDLERTEERAELAESRCREMDEQIRLMDQNLKCLSAAEEKYSQKEDKYEEEIKILTDKLKEAETRAEFAERSVAKLEKTIDDLEERLYSQLERNRLLSNELKLTLHDLCD

SEQ ID NO: 37514 - protein, 247 aa, Homo sapiens
  REGION 1..247: note = ENSP00000357518
MAGITTIEAVKRKIQVLQQQADDAEERAERLQREVEGERRAREQAEAEVASLNRRIQLVEEELDRAQERLATALQKLEEAEKAADESERGMKVIENRALKDEEKMELQEIQLKEAKHIAEEADRKYEEVARKLVIIEGDLERTEERAELAESKCSELEEELKNVTNNLKSLEAQAEKYSQKEDKYEEEIKILTDKLKEAETRAEFAERSVAKLEKTIDDLEERLYSQLERNRLLSNELKLTLHDLCD

SEQ ID NO: 37515 - protein, 285 aa, Homo sapiens
  REGION 1..285: note = ENSP00000357516
MMEAIKKKMQMLKLDKENALDRAEQAEAEQKQAEERSKQLEDELAAMQKKLKGTEDELDKYSEALKDAQEKLELAEKKAADAEAEVASLNRRIQLVEEELDRAQERLATALQKLEEAEKAADESERGMKVIENRALKDEEKMELQEIQLKEAKHIAEEADRKYEEVARKLVIIEGDLERTEERAELAESKCSELEEELKNVTNNLKSLEAQAEKYSQKEDKYEEEIKILTDKLKEAETRAEFAERSVAKLEKTIDDLEDELYAQKLKYKAISEELDHALNDMTSI

SEQ ID NO: 37516 - protein, 95 aa, Homo sapiens
  REGION 1..95: note = ENSP00000422207
MAGITTIEAVKRKIQVLQQQADDAEERAERLQREVEGERRAREQAEAEVASLNRRIQLVEEELDRAQERLATALQKLEEAEKAADESERWMSRLD

SEQ ID NO: 37517 - protein, 75 aa, Homo sapiens
  REGION 1..75: note = ENSP00000426306
MMEAIKKKMQMLKLDKENALDRAEQAEAEQKQAEERSKQLEDELAAMQKKLKGTEDELDKYSEALKDAQEKLELA

SEQ ID NO: 37518 - protein, 227 aa, Homo sapiens
  REGION 1..227: note = ENSP00000480520
MAGITTIEAVKRKIQVLQQQADDAEERAERLQREVEGERRAREQAEAEVASLNRRIQLVEEELDRAQERLATALQKLEEAEKAADESERGMKVIENRALKDEEKMELQEIQLKEAKHIAEEADRKYEEVARKLVIIEGDLERTEERAELAESRCREMDEQIRLMDQNLKCLSAAEEKAETRAEFAERSVAKLEKTIDDLEDKLKCTKEEHLCTQRMLDQTLLDLNEM

SEQ ID NO: 37519 - protein, 69 aa, Homo sapiens
  REGION 1..69: note = ENSP00000466158
MEAIKKKMQMLKLDKENAIDRAEQAEADKKAAEDKCKQVEEELTHLQKKLKGTEDELDKYSEDLKDAQE

SEQ ID NO: 37520 - protein, 284 aa, Homo sapiens
  REGION 1..284: note = ENSP00000345230
MEAIKKKMQMLKLDKENAIDRAEQAEADKKAAEDKCKQVEEELTHLQKKLKGTEDELDKYSEDLKDAQEKLELTEKKASDAEGDVAALNRRIQLVEEELDRAQERLATALQKLEEAEKAADESERGMKVIENRAMKDEEKMEIQEMQLKEAKHIAEEADRKYEEVARKLVILEGELERAEERAEVSELKCGDLEEELKNVTNNLKSLEAASEKYSEKEDKYEEEIKLLSDKLKEAETRAEFAERTVAKLEKTIDDLEEKLAQAKEENVGLHQTLDQTLNELNCI

SEQ ID NO: 37521 - protein, 170 aa, Homo sapiens
  REGION 1..170: note = ENSP00000468246
MGSWAGRGVTIGPTPSRASANKVEEELTHLQKKLKGTEDELDKYSEDLKDAQEKLELTEKKASDAEGDVAALNRRIQLVEEELDRAQERLATALQKLEEAEKAADESERGMKVIENRAMKDEEKMEIQEMQLKEAKHIAEEADRKYEEVARKLVILEGELERAEERAEVS

SEQ ID NO: 37522 - protein, 179 aa, Homo sapiens
  REGION 1..179: note = ENSP00000467087
MVEEELTHLQKKLKGTEDELDKYSEDLKDAQEKLELTEKKASDAEGDVAALNRRIQLVEEELDRAQERLATALQKLEEAEKAADESERGMKVIENRAMKDEEKMEIQEMQLKEAKHIAEEADRKYEEVARKLVILEGELERAEERAEVSELKCGDLEEELKNVTNNLKSLEAASEKYSE

SEQ ID NO: 37523 - protein, 96 aa, Homo sapiens
  REGION 1..96: note = ENSP00000467558
MKVIENRAMKDEEKMEIQEMQLKEAKHIAEEADRKYEEVARKLVILEGELERAEERAEVSELKCGDLEEELKNVTNNLKSLEAASEKYSEKEDKYE

SEQ ID NO: 37524 - protein, 248 aa, Homo sapiens
  REGION 1..248: note = ENSP00000300933
MAGLNSLEAVKRKIQALQQQADEAEDRAQGLQRELDGERERREKAEGDVAALNRRIQLVEEELDRAQERLATALQKLEEAEKAADESERGMKVIENRAMKDEEKMEIQEMQLKEAKHIAEEADRKYEEVARKLVILEGELERAEERAEVSELKCGDLEEELKNVTNNLKSLEAASEKYSEKEDKYEEEIKLLSDKLKEAETRAEFAERTVAKLEKTIDDLEEKLAQAKEENVGLHQTLDQTLNELNCI

SEQ ID NO: 37525 - protein, 138 aa, Homo sapiens
  REGION 1..138: note = ENSP00000467250
MSSMPATKFSFPFHIFLSCHLSARRIEGWNSNEAPPPRPTLAEGDVAALNRRIQLVEEELDRAQERLATALQKLEEAEKAADESERGMKVIENRAMKDEEKMEIQEMQLKEAKHIAEEADRKYEEVARKLVILEGELE

SEQ ID NO: 37526 - protein, 16 aa, Homo sapiens
  REGION 1..16: note = ENSP00000466106
MKVIENRAMKDEEKME

SEQ ID NO: 37527 - protein, 102 aa, Homo sapiens
  REGION 1..102: note = ENSP00000466654
MKVIENRAMKDEEKMEIQEMQLKEAKHIAEEADRKYEEVARKLVILEGELERAEERAEVSELKCGDLEEELKNVTNNLKSLEAASEKYSEKEDKYEEEIKLL

SEQ ID NO: 37528 - protein, 110 aa, Homo sapiens
  REGION 1..110: note = ENSP00000467319
  VARIANT 1: note = Any amino acid
XLERAEERAEVSELKCGDLEEELKNVTNNLKSLEAASEKYSEKEDKYEEEIKLLSDKLKEAETRAEFAERTVAKLEKTIDDLEEKLAQAKEENVGLHQTLDQTLNELNCI

SEQ ID NO: 37529 - protein, 59 aa, Homo sapiens
  REGION 1..59: note = ENSP00000468010
KLLSDKLKEAETRAEFAERTVAKLEKTIDDLEDELYAQKLKYKAISEELDHALNDMTSL

SEQ ID NO: 37530 - protein, 219 aa, Homo sapiens
  REGION 1..219: note = ENSP00000353785
MADKAKPAKAANRTPPKSPGDPSKDRAAKRLSLESEGAGEGAAASPELSALEEAFRRFAVHGDARATGREMHGKNWSKLCKDCQVIDGRNVTVTDVDIVFSKIKGKSCRTITFEQFQEALEELAKKRFKDKSSEEAVREVHRLIEGKAPIISGVTKAISSPTVSRLTDTTKFTGSHKERFDPSGKGKGKAGRVDLVDESGYVSGYKHAGTYDQKVQGGK

SEQ ID NO: 37531 - protein, 172 aa, Homo sapiens
  REGION 1..172: note = ENSP00000431872
MIIYRDLISHDEMFSDIYKIREIADGLCLEVEGKMVSRTEGNIDDSLIGGNASAEGPEGEGTESTVITGVDIVMNHHLQETSFTKEAYKKYIKDYMKSIKGKLEEQRPERVKPFMTGAAEQIKHILANFKNYQFFIGENMNPDGMVALLDYREDGVTPYMIFFKDGLEMEKC

SEQ ID NO: 37532 - protein, 138 aa, Homo sapiens
  REGION 1..138: note = ENSP00000368345
MVSRTEGNIDDSLIGGNASAEGPEGEGTESTVITGVDIVMNHHLQETSFTKEAYKKYIKDYMKSIKGKLEEQRPERVKPFMTGAAEQIKHILANFKNYQFFIGENMNPDGMVALLDYREDGVTPYMIFFKDGLEMEKC

SEQ ID NO: 37533 - protein, 77 aa, Homo sapiens
  REGION 1..77: note = ENSP00000433091
  VARIANT 1: note = Any amino acid
XIKHILANFKNYQFFIGENMNPDGMVALLDYREDGVTPYMIFFKDGLEMEKCDAKERNPCAFCLSLWRPRLNWGIHL

SEQ ID NO: 37534 - protein, 77 aa, Homo sapiens; identical to SEQ ID NO: 37533
  REGION 1..77: note = ENSP00000432457
  VARIANT 1: note = Any amino acid

SEQ ID NO: 37535 - protein, 160 aa, Homo sapiens
  REGION 1..160: note = ENSP00000368350
MFSDIYKIREIADGLCLEVEGKMVSRTEGNIDDSLIGGNASAEGPEGEGTESTVITGVDIVMNHHLQETSFTKEAYKKYIKDYMKSIKGKLEEQRPERVKPFMTGAAEQIKHILANFKNYQFFIGENMNPDGMVALLDYREDGVTPYMIFFKDGLEMEKC

SEQ ID NO: 37536 - protein, 138 aa, Homo sapiens; identical to SEQ ID NO: 37532
  REGION 1..138: note = ENSP00000368344

SEQ ID NO: 37537 - protein, 188 aa, Homo sapiens
  REGION 1..188: note = ENSP00000339051
MIIYRDLISHDEMFSDIYKIREIADGLCLEVEGKMVSRTEGNIDDSLIGGNASAEGPEGEGTESTVITGVDIVMNHHLQETSFTKEAYKKYIKDYMKSIKGKLEEQRPERVKPFMTGAAEQIKHILANFKNYQFFIGENMNPDGMVALLDYREDGVTPYMIFFKDGLEMEKCVSTRKWVKINNVKKTF

SEQ ID NO: 37538 - protein, 162 aa, Homo sapiens
  REGION 1..162: note = ENSP00000433738
MGGSVYPADDEMFSDIYKIREIADGLCLEVEGKMVSRTEGNIDDSLIGGNASAEGPEGEGTESTVITGVDIVMNHHLQETSFTKEAYKKYIKDYMKSIKGKLEEQRPERVKPFMTGAAEQIKHILANFKNYQFFIGENMNPDGMVALLDYREDGVTPYMIFF

SEQ ID NO: 37539 - protein, 197 aa, Homo sapiens
  REGION 1..197: note = ENSP00000477781
MIIYRDLISHDEMFSDIYKIREIADGLCLEVEGKMVSRTEGNIDDSLIGGNASAEGPEGEGTESTVITGVDIVMNHHLQETSFTKEAYKKYIKDYMKSIKGKLEEQRPERVKPFMTGAAEQIKHILANFKNYQFFIGENMNPDGMVALLDYREDGVTPYMIFFKDGLEMEKCDAKERNPCAFCLSLWRPRLNWGIHL

SEQ ID NO: 37540 - protein, 288 aa, Homo sapiens
  REGION 1..288: note = ENSP00000416959
MSDSGEQNYGERESRSASRSGSAHGSGKSARHTPARSRSKEDSRRSRSKSRSRSESRSRSRRSSRRHYTRSRSRSRSHRRSRSRSYSRDYRRRHSHSHSPMSTRRRHVGNRANPDPNCCLGVFGLSLYTTERDLREVFSKYGPIADVSIVYDQQSRRSRGFAFVYFENVDDAKEAKERANGMELDGRRIRVDFSITKRPHTPTPGIYMGRPTYGSSRRRDYYDRGYDRGYDDRDYYSRSYRGGGGGGGGWRAAQDRDQIYRRRSPSPYYSRGGYRSRSRSRSYSPRRY

SEQ ID NO: 37541 - protein, 127 aa, Homo sapiens
  REGION 1..127: note = ENSP00000259043
  VARIANT 1: note = Any amino acid
XPIADVSIVYDQQSRRSRGFAFVYFENVDDAKEAKERANGMELDGRRIRVDFSITKRPHTPTPGIYMGRPTYGSSRRRDYYDRGYDRGYDDRDYYSRSYRRRSPSPYYSRGGYRSRSRSRSYSPRRY

SEQ ID NO: 37542 - protein, 107 aa, Homo sapiens
  REGION 1..107: note = ENSP00000406561
  VARIANT 1: note = Any amino acid
XMELDGRRIRVDFSITKRPHTPTPGIYMGRPTYGSSRRRDYYDRGYDRGYDDRDYYSRSYRGGGGGGGGWRAAQDRDQIYRRSPSPYYSRGGYRSRSRSRSYSPRRY

SEQ ID NO: 37543 - protein, 38 aa, Homo sapiens
  REGION 1..38: note = ENSP00000416887
MSDSGEQNYGERVNVEEGKCGSRHLTSFINEYLKLRNK

SEQ ID NO: 37544 - protein, 188 aa, Homo sapiens
  REGION 1..188: note = ENSP00000371626
MSTRRRHVGNRANPDPNCCLGVFGLSLYTTERDLREVFSKYGPIADVSIVYDQQSRRSRGFAFVYFENVDDAKEAKERANGMELDGRRIRVDFSITKRPHTPTPGIYMGRPTYGSSRRRDYYDRGYDRGYDDRDYYSRSYRGGGGGGGGWRAAQDRDQIYRRRSPSPYYSRGGYRSRSRSRSYSPRRY

SEQ ID NO: 37545 - protein, 38 aa, Homo sapiens; identical to SEQ ID NO: 37543
  REGION 1..38: note = ENSP00000343857

SEQ ID NO: 37546 - protein, 517 aa, Homo sapiens
  REGION 1..517: note = ENSP00000476820
MHAALAGPLLAALLATARARPQPPDGGQCRPPGSQRDLNSFLWTIRRDPPAYLFGTIHVPYTRVWDFIPDNSKAAFQASTRVYFELDLTDPYTISALASCQLLPHGENLQDVLPHELYWRLKRHLDYVKLMMPSWMTPAQRGKGLYADYLFNAIAGNWERKRPVWVMLMVNSLTERDVRFRGVPVLDLYLAQQAEKMKKTTGAVEQVEEQCHPLNNGLNFSQVLFALNQTLLQQESVRAGSLQASYTTEDLIKHYNCGDLSAVIFNHDTSQLPNFINTTLPPHEQVTAQEIDSYFRQELIYKRNERMGKRVMALLRENEDKICFFAFGAGHFLGNNTVIDILRQAGLEVDHTPAGQAIHSPAPQSPAPSPEGTSTSPAPVTPAAAVPEAPSVTPTAPPEDEDPALSPHLLLPDSLSQLEEFGRQRKWHKRQSTHQRPRQFNDLWVRIEDSTTASPPPLPLQPTHSSGTAKPPFQLSDQLQQQDPPGPASSSAPTLGLLPAIATTIAVCFLLHSLGPS

SEQ ID NO: 37547 - protein, 416 aa, Homo sapiens
  REGION 1..416: note = ENSP00000362994
MASSSGSSPRPAPDENEFPFGCPPTVCQDPKEPRALCCAGCLSENPRNGEDQICPKCRGEDLQSISPGSRLRTQEKAHPEVAEAGIGCPFAGVGCSFKGSPQSVQEHEVTSQTSHLNLLLGFMKQWKARLGCGLESGPMALEQNLSDLQLQAAVEVAGDLEVDCYRAPCSESQEELALQHFMKEKLLAELEGKLRVFENIVAVLNKEVEASHLALATSIHQSQLDRERILSLEQRVVELQQTLAQKDQALGKLEQSLRLMEEASFDGTFLWKITNVTRRCHESACGRTVSLFSPAFYTAKYGYKLCLRLYLNGDGTGKRTHLSLFIVIMRGEYDALLPWPFRNKVTFMLLDQNNREHAIDAFRPDLSSASFQRPQSETNVASGCPLFFPLSKLQSPKHAYVKDDTMFLKCIVETST

SEQ ID NO: 37548 - protein, 294 aa, Homo sapiens
  REGION 1..294: note = ENSP00000438583
MKQWKARLGCGLESGPMALEQNLSDLQLQAAVEVAGDLEVDCYRAPCSESQEELALQHFMKEKLLAELEGKLRVFENIVAVLNKEVEASHLALATSIHQSQLDRERILSLEQRVVELQQTLAQKDQALGKLEQSLRLMEEASFDGTFLWKITNVTRRCHESACGRTVSLFSPAFYTAKYGYKLCLRLYLNGDGTGKRTHLSLFIVIMRGEYDALLPWPFRNKVTFMLLDQNNREHAIDAFRPDLSSASFQRPQSETNVASGCPLFFPLSKLQSPKHAYVKDDTMFLKCIVETST

SEQ ID NO: 37549 - protein, 416 aa, Homo sapiens; identical to SEQ ID NO: 37547
  REGION 1..416: note = ENSP00000443183

SEQ ID NO: 37550 - protein, 470 aa, Homo sapiens
  REGION 1..470: note = ENSP00000262395
MPGFDYKFLEKPKRRLLCPLCGKPMREPVQVSTCGHRFCDTCLQEFLSEGVFKCPEDQLPLDYAKIYPDPELEVQVLGLPIRCIHSEEGCRWSGPLRHLQGHLNTCSFNVIPCPNRCPMKLSRRDLPAHLQHDCPKRRLKCEFCGCDFSGEAYESHEGMCPQESVYCENKCGARMMRRLLAQHATSECPKRTQPCTYCTKEFVFDTIQSHQYQCPRLPVACPNQCGVGTVAREDLPGHLKDSCNTALVLCPFKDSGCKHRCPKLAMARHVEESVKPHLAMMCALVSRQRQELQELRRELEELSVGSDGVLIWKIGSYGRRLQEAKAKPNLECFSPAFYTHKYGYKLQVSAFLNGNGSGEGTHLSLYIRVLPGAFDNLLEWPFARRVTFSLLDQSDPGLAKPQHVTETFHPDPNWKNFQKPGTWRGSLDESSLGFGYPKFISHQDIRKRNYVRDDAVFIRAAVELPRKILS

SEQ ID NO: 37551 - protein, 49 aa, Homo sapiens
  REGION 1..49: note = ENSP00000464097
MPGFDYKFLEKPKRRLLCPLCGKPMREPVQVSTCGHRFCDTCLQEFLRS

SEQ ID NO: 37552 - protein, 182 aa, Homo sapiens
  REGION 1..182: note = ENSP00000415789
MPGFDYKFLEKPKRRLLCPLCGKPMREPVQVSTCGHRFCDTCLQEFLSEGVFKCPEDQLPLDYAKFPHPYPQIYPDPELEVQVLGLPIRCIHSEEGCRWSGPLRHLQGHLNTCSFNVIPCPNRCPMKLSRRDLPAHLQHDCPKRRLKCEFCGCDFSGEAYESHEGMCPQESVYCENKCGARM

SEQ ID NO: 37553 - protein, 53 aa, Homo sapiens
  REGION 1..53: note = ENSP00000466306
MPGFDYKFLEKPKRRLLCPLCGKPMREPVQVSTCGHRFCDTCLQEFLRSLQVP

SEQ ID NO: 37554 - protein, 437 aa, Homo sapiens
  REGION 1..437: note = ENSP00000438154
MPGFDYKFLEKPKRRLLCPLCGKPMREPVQVSTCGHRFCDTCLQEFLSEGVFKCPEDQLPLDYAKIYPDPELEVQVLGLPIRCIHSEEGCRWSGPLRHLQGHLNTCSFNVIPCPNRCPMKLSRRDLPAHLQHDCPKRRLKCEFCGCDFSGEAYESHEGMCPQESVYCENKCGARMMRRLLAQHATSECPKRTQPCTYCTKEFVFDTIQSHQYQCPRLPVACPNQCGVGTVAREDLPGHLKDSCNTALVLCPFKDSGCKHRCPKLAMARHVEESVKPHLAMMCALVSRQRQELQELRRELEELSVGSDGVLIWKIGSYGRRLQEAKAKPNLECFSPAFYTHKYGYKLQVSAFLNGNGSGEGTHLSLYIRVLPGAFDNLLEWPFARRGLSPFLGRADMPWCRSHSTRTEVPAQVLCPKSHKGVGIGEGERVVQRVCLEI

SEQ ID NO: 37555 - protein, 195 aa, Homo sapiens
  REGION 1..195: note = ENSP00000262396
MPGFDYKFLEKPKRRLLCPLCGKPMREPVQVSTCGHRFCDTCLQEFLSEGVFKCPEDQLPLDYAKIYPDPELEVQVLGLPIRCIHSEEGCRWSGPLRHLQGHLNTCSFNVIPCPNRCPMKLSRRDLPAHLQHDCPKRRLKCEFCGCDFSGEAYESSLGFGYPKFISHQDIRKRNYVRDDAVFIRAAVELPRKILS

SEQ ID NO: 37556 - protein, 92 aa, Homo sapiens
  REGION 1..92: note = ENSP00000464583
  VARIANT 1: note = Any amino acid
XFCDTCLQEFLSEGVFKCPEDQLPLDYAKVSPHCQEEAQAQSVALGGRSCWQPVGSGPVSTKSLGMVRLHKDLPRPGAGSTSIGPAYPLHPQ

SEQ ID NO: 37557 - protein, 48 aa, Homo sapiens
  REGION 1..48: note = ENSP00000465164
MKLSRRDLPAHLQHDCPKRRLKCEFCGCDFSGEAYESHEGMCPQESVY

SEQ ID NO: 37558 - protein, 90 aa, Homo sapiens
  REGION 1..90: note = ENSP00000468107
MKLSRRDLPAHLQHDCPKRRLKCEFCGCDFSGEAYESHEGMCPQESVYCENKCGARMMRRLLAQHATSECPKRTQPCTYCTKEFVFDTIQ

SEQ ID NO: 37559 - protein, 112 aa, Homo sapiens
  REGION 1..112: note = ENSP00000396602
EGVFKCPEDQLPLDYAKIYPDPELEVQVLGLPIRCIHSEEGCRWSGPLRHLQGHLNTCSFNVIPCPNRCPMKLSRRDLPAHLQHDCPKRRLKAMRVCAPRRVSTVRISVVPA

SEQ ID NO: 37560 - protein, 144 aa, Homo sapiens
  REGION 1..144: note = ENSP00000481248
MPGFDYKFLEKPKRRLLCPLCGKPMREPVQVSTCGHRFCDTCLQEFLSEGVFKWPFARRVTFSLLDQSDPGLAKPQHVTETFHPDPNWKNFQKPGTWRGSLDESSLGFGYPKFISHQDIRKRNYVRDDAVFIRAAVELPRKILS

SEQ ID NO: 37561 - protein, 557 aa, Homo sapiens
  REGION 1..557: note = ENSP00000261464
MAYSEEHKGMPCGFIRQNSGNSISLDFEPSIEYQFVERLEERYKCAFCHSVLHNPHQTGCGHRFCQHCILSLRELNTVPICPVDKEVIKSQEVFKDNCCKREVLNLYVYCSNAPGCNAKVILGRYQDHLQQCLFQPVQCSNEKCREPVLRKDLKEHLSASCQFRKEKCLYCKKDVVVINLQNHEENLCPEYPVFCPNNCAKIILKTEVDEHLAVCPEAEQDCPFKHYGCAVTDKRRNLQQHEHSALREHMRLVLEKNVQLEEQISDLHKSLEQKESKIQQLAETIKKLEKEFKQFAQLFGKNGSFLPNIQVFASHIDKSAWLEAQVHQLLQMVNQQQNKFDLRPLMEAVDTVKQKITLLENNDQRLAVLEEETNKHDTHINIHKAQLSKNEERFKLLEGTCYNGKLIWKVTDYKMKKREAVDGHTVSIFSQSFYTSRCGYRLCARAYLNGDGSGRGSHLSLYFVVMRGEFDSLLQWPFRQRVTLMLLDQSGKKNIMETFKPDPNSSSFKRPDGEMNIASGCPRFVAHSVLENAKNAYIKDDTLFLKVAVDLTDLEDL

SEQ ID NO: 37562 - protein, 557 aa, Homo sapiens; identical to SEQ ID NO: 37561
  REGION 1..557: note = ENSP00000355971

SEQ ID NO: 37563 - protein, 557 aa, Homo sapiens; identical to SEQ ID NO: 37561
  REGION 1..557: note = ENSP00000336825

SEQ ID NO: 37564 - protein, 729 aa, Homo sapiens
  REGION 1..729: note = ENSP00000333984
MTEITAEGNASTTTTVIDSKNGSVPKSPGKVLKRTVTEDIVTTFSSPAAWLLVIALIITWSAVAIVMFDLVDYKNFSASSIAKIGSDPLKLVRDAMEETTDWIYGFFSLLSDIISSEDEEDDDGDEDTDKGEIDEPPLRKKEIHKDKTEKQEKPERKIQTKVTHKEKEKGKEKVREKEKPEKKATHKEKIEKKEKPETKTLAKEQKKAKTAEKSEEKTKKEVKGGKQEKVKQTAAKVKEVQKTPSKPKEKEDKEKAAVSKHEQKDQYAFCRYMIDIFVHGDLKPGQSPAIPPPLPTEQASRPTPASPALEEKEGEKKKAEKKVTSETKKKEKEDIKKKSEKETAIDVEKKEPGKASETKQGTVKIAAQAAAKKDEKKEDSKKTKKPAEVEQPKGKKQEKKEKHVEPAKSPKKEHSVPSDKQVKAKTERAKEEIGAVSIKKAVPGKKEEKTTKTVEQEIRKEKSGKTSSILKDKEPIKGKEEKVPASLKEKEPETKKDEKMSKAGKEVKPKPPQLQGKKEEKPEPQIKKEAKPAISEKVQIHKQDIVKPEKTVSHGKPEEKVLKQVKAVTIEKTAKPKPTKKAEHREREPPSIKTDKPKPTPKGTSEVTESGKKKTEISEKESKEKADMKHLREEKVSTRKESLQLHNVTKAEKPARVSKDVEDVPASKKAKEGTEDVSPTKQKSPISFFQCVYLDGYNGYGFQFPFTPADRPGESSGQANSPGQKQQGQ

SEQ ID NO: 37565 - protein, 297 aa, Homo sapiens
  REGION 1..297: note = ENSP00000486095
MTEITAEGNASTTTTVIDSKNGSVPKSPGKVLKRTVTEDIVTTFSSPAAWLLVIALIITWSAVAIVMFDLVDYKNFSASSIAKIGSDPLKLVRDAMEETTDWIYGFFSLLSDIISSEDEEDDDGDEDTDKGEIDEPPLRKKEIHKDKTEKQEKPERKIQTKVTHKEKEKGKEKVREKEKPEKKATHKEKIEKKEKPETKTLAKEQKKAKTAEKSEEKTKKEVKGGKQEKVKQTAAKVKEVQKTPSKPKEKEDKEKAAVSKHEQKGQSPAIPPPLPTEQASRPTPASPALEGKYFFFS

SEQ ID NO: 37566 - protein, 151 aa, Homo sapiens
  REGION 1..151: note = ENSP00000354307
  VARIANT 1: note = Any amino acid
XTHKEKEKGKEKVREKEKPEKKATHKEKIEKKEKPETKTLAKEQKKAKTAEKSEEKTKKEVKGGKQEKVKQTAAKVKEVQKTPSKPKEKEDKEKAAVSKHEQKGFPGPGIRNSSYYCQYIKGQINAWNDLRTSLLPIPYLSCGKMCSNFNN

SEQ ID NO: 37567 - protein, 167 aa, Homo sapiens
  REGION 1..167: note = ENSP00000437684
MTEITAEGNASTTTTVIDSKNGSVPKSPGKVLKRTVTEDIVTTFSSPAAWLLVIALIITWSAVAIVMFDLVDYKNFSASSIAKIGSDPLKLVRDAMEETTDWIYGFFSLLSDIISSEDEEDDDGDEDTDKGEIDEPPLRKKEIHKDKTEKQEKPERKIQTKEVGHSS

SEQ ID NO: 37568 - protein, 44 aa, Homo sapiens
  REGION 1..44: note = ENSP00000406768
  VARIANT 1: note = Any amino acid
XIHKDKTEKQEKPERKIQTKDWSANSSTIRTLKLTQLKPIYICT

SEQ ID NO: 37569 - protein, 286 aa, Homo sapiens
  REGION 1..286: note = ENSP00000439281
MTEITAEGNASTTTTVIDSKNGSVPKSPGKVLKRTVTEDIVTTFSSPAAWLLVIALIITWSAVAIVMFDLVDYKNFSASSIAKIGSDPLKLVRDAMEETTDWIYGFFSLLSDIISSEDEEDDDGDEDTDKGEIDEPPLRKKEIHKDKTEKQEKPERKIQTKVTHKEKEKGKEKVREKEKPEKKATHKEKIEKKEKPETKTLAKEQKKAKTAEKSEEKTKKEVKGGKQEKVKQTAAKVKEVQKTPSKPKEKEDKEKAAVSKHEQKGKHSEQEAAGGSKRILGKKHMQ

SEQ ID NO: 37570 - protein, 583 aa, Homo sapiens
  REGION 1..583: note = ENSP00000264029
MPGRTWELCLLLLLGLGLGSQEALPPPCESEIYCHGELLNQVQMAKLYQDDKQFVDMPLSIAPEQVLQTFTELSRDHNHSIPREQLQAFVHEHFQAKGQELQPWTPADWKDSPQFLQKISDAKLRAWAGQLHQLWKKLGKKMKPEVLSHPERFSLIYSEHPFIVPGGRFVEFYYWDSYWVMEGLLLSEMAETVKGMLQNFLDLVKTYGHVPNGGRVYYLQRSQPPLLTLMMDCYLTHTNDTAFLQENIETLALELDFWTKNRTVSVSLEGKNYLLNRYYVPYGGPRPESYSKDVELADTLPEGDREALWAELKAGAESGWDFSSRWLIGGPNPNSLSGIRTSKLVPVDLNAFLCQAEELMSNFYSRLGNDSQATKYRILRSQRLAALNTVLWDEQTGAWFDYDLEKKKKNREFYPSNLTPLWAGCFSDPGVADKALKYLEDNRILTYQYGIPTSLQKTGQQWDFPNAWAPLQDLVIRGLAKAPLRRAQEVAFQLAQNWIRTNFDVYSQKSAMYEKYDVSNGGQPGGGGEYEVQEGFGWTNGVVLMLLDRYGDRLTSGAKLAFLEPHCLAATLLPSLLLSLLPW

SEQ ID NO: 37571 - protein, 37 aa, Homo sapiens
  REGION 1..37: note = ENSP00000477923
MPGRTWELCLLLLLGLGLGSQEALPPPCERTSPADLH

SEQ ID NO: 37572 - protein, 552 aa, Homo sapiens
  REGION 1..552: note = ENSP00000381020
MPGRTWELCLLLLLGLGLGSQEALPPPCESEIYCHGELLNQVQMAKLYQDDKQFVDMPLSIAPEQVLQTFTELSRDHNHSIPREQLQAFVHEHFQAKGQELQPWTPADWKDSPQFLQKISDAKLRAWAGQLHQLWKKLGKKMKPEVLSHPERFSLIYSEHPFIVPGGRFVEFYYCYGHVPNGGRVYYLQRSQPPLLTLMMDCYLTHTNDTAFLQENIETLALELDFWTKNRTVSVSLEGKNYLLNRYYVPYGGPRPESYSKDVELADTLPEGDREALWAELKAGAESGWDFSSRWLIGGPNPNSLSGIRTSKLVPVDLNAFLCQAEELMSNFYSRLGNDSQATKYRILRSQRLAALNTVLWDEQTGAWFDYDLEKKKKNREFYPSNLTPLWAGCFSDPGVADKALKYLEDNRILTYQYGIPTSLQKTGQQWDFPNAWAPLQDLVIRGLAKAPLRRAQEVAFQLAQNWIRTNFDVYSQKSAMYEKYDVSNGGQPGGGGEYEVQEGFGWTNGVVLMLLDRYGDRLTSGAKLAFLEPHCLAATLLPSLLLSLLPW

SEQ ID NO: 37573 - protein, 222 aa, Homo sapiens
  REGION 1..222: note = ENSP00000362214
MEPLRLLILLFVTELSGAHNTTVFQGVAGQSLQVSCPYDSMKHWGRRKAWCRQLGEKGPCQRVVSTHNLWLLSFLRRWNGSTAITDDTLGGTLTITLRNLQPHDAGLYQCQSLHGSEADTLRKVLVEVLADPLDHRDAGDLWFPGESESFEDAHVEHSISRPSQGSHLPSCLSKEPLGRRNPLPTHFHPSPPGLHLSHQDSSSQRPLGCSLAWTEARDTSTQ

SEQ ID NO: 37574 - protein, 230 aa, Homo sapiens
  REGION 1..230: note = ENSP00000362205
MEPLRLLILLFVTELSGAHNTTVFQGVAGQSLQVSCPYDSMKHWGRRKAWCRQLGEKGPCQRVVSTHNLWLLSFLRRWNGSTAITDDTLGGTLTITLRNLQPHDAGLYQCQSLHGSEADTLRKVLVEVLADPLDHRDAGDLWFPGESESFEDAHVEHSISRSLLEGEIPFPPTSILLLLACIFLIKILAASALWAAAWHGQKPGTHPPSELDCGHDPGYQLQTLPGLRDT

SEQ ID NO: 37575 - protein, 219 aa, Homo sapiens
  REGION 1..219: note = ENSP00000342651
MEPLRLLILLFVTELSGAHNTTVFQGVAGQSLQVSCPYDSMKHWGRRKAWCRQLGEKGPCQRVVSTHNLWLLSFLRRWNGSTAITDDTLGGTLTITLRNLQPHDAGLYQCQSLHGSEADTLRKVLVEVLADPLDHRDAGDLWFPGESESFEDAHVEHSISRAERHVKEDDGRKSPGEVPPGTSPACILATWPPGLLVLLWQETTLPEHCFSWTLEAGTG

SEQ ID NO: 37576 - protein, 1024 aa, Homo sapiens
  REGION 1..1024: note = ENSP00000261180
MGEDDAALRAGSRGLSDPWADSVGVRPRTTERHIAVHKRLVLAFAVSLVALLAVTMLAVLLSLRFDECGASATPGADGGPSGFPERGGNGSLPGSARRNHHAGGDSWQPEAGGVASPGTTSAQPPSEEEREPWEPWTQLRLSGHLKPLHYNLMLTAFMENFTFSGEVNVEIACRNATRYVVLHASRVAVEKVQLAEDRAFGAVPVAGFFLYPQTQVLVVVLNRTLDAQRNYNLKIIYNALIENELLGFFRSSYVLHGERRFLGVTQFSPTHARKAFPCFDEPIYKATFKISIKHQATYLSLSNMPVETSVFEEDGWVTDHFSQTPLMSTYYLAWAICNFTYRETTTKSGVVVRLYARPDAIRRGSGDYALHITKRLIEFYEDYFKVPYSLPKLDLLAVPKHPYAAMENWGLSIFVEQRILLDPSVSSISYLLDVTMVIVHEICHQWFGDLVTPVWWEDVWLKEGFAHYFEFVGTDYLYPGWNMEKQRFLTDVLHEVMLLDGLASSHPVSQEVLQATDIDRVFDWIAYKKGAALIRMLANFMGHSVFQRGLQDYLTIHKYGNAARNDLWNTLSEALKRNGKYVNIQEVMDQWTLQMGYPVITILGNTTAENRIIITQQHFIYDISAKTKALKLQNNSYLWQIPLTIVVGNRSHVSSEAIIWVSNKSEHHRITYLDKGSWLLGNINQTGYFRVNYDLRNWRLLIDQLIRNHEVLSVSNRAGLIDDAFSLARAGYLPQNIPLEIIRYLSEEKDFLPWHAASRALYPLDKLLDRMENYNIFNEYILKQVATTYIKLGWPKNNFNGSLVQASYQHEELRREVIMLACSFGNKHCHQQASTLISDWISSNRNRIPLNVRDIVYCTGVSLLDEDVWEFIWMKFHSTTAVSEKKILLEALTCSDDRNLLNRLLNLSLNSEVVLDQDAIDVIIHVARNPHGRDLAWKFFRDKWKILNTRYGEALFMNSKLISGVTEFLNTEGELKELKNFMKNYDGVAAASFSRAVETVEANVRWKMLYQDELFQWLGKALRH

SEQ ID NO: 37577 - protein, 194 aa, Homo sapiens
  REGION 1..194: note = ENSP00000447822
  VARIANT 1: note = Any amino acid
XIYNALIENELLGFFRSSYVLHGERRFLGVTQFSPTHARKAFPCFDEPIYKATFKISIKHQATYLSLSNMPVETSVFEEDGWVTDHFSQTPLMSTYYLAWAICNFTYRETTTKSGVVGAALIRMLANFMGHSVFQRGLQDYLTIHKYGNAARNDLWNTLSEALKRNGKYVNIQEVMDQWTLQMGYPVITILGNT

SEQ ID NO: 37578 - protein, 811 aa, Homo sapiens
  REGION 1..811: note = ENSP00000479256
MEAARALRLLLVVCGCLALPPLAEPVCPERCDCQHPQHLLCTNRGLRVVPKTSSLPSPHDVLTYSLGGNFITNITAFDFHRLGQLRRLDLQYNQIRSLHPKTFEKLSRLEELYLGNNLLQALAPGTLAPLRKLRILYANGNEISRLSRGSFEGLESLVKLRLDGNALGALPDAVFAPLGNLLYLHLESNRIRFLGKNAFAQLGKLRFLNLSANELQPSLRHAATFAPLRSLSSLILSANNLQHLGPRIFQHLPRLGLLSLRGNQLTHLAPEAFWGLEALRELRLEGNRLSQLPTALLEPLHSLEALDLSGNELSALHPATFGHLGRLRELSLRNNALSALSGDIFAASPALYRLDLDGNGWTCDCRLRGLKRWMGDWHSQGRLLTVFVQCRHPPALRGKYLDYLDDQQLQNGSCADPSPSASLTADRRRQPLPTAAGEEMTPPAGLAEELPPQPQLQQQGRFLAGVAWDGAARELVGNRSALRLSRRGPGLQQPSPSVAAAAGPAPQSLDLHKKPQRGRPTRADPALAEPTPTASPGSAPSPAGDPWQRATKHRLGTEHQERAAQSDGGAGLPPLVSDPCDFNKFILCNLTVEAVGADSASVRWAVREHRSPRPLGGARFRLLFDRFGQQPKFHRFVYLPESSDSATLRELRGDTPYLVCVEGVLGGRVCPVAPRDHCAGLVTLPEAGSRGGVDYQLLTLALLTVNALLVLLALAAWASRWLRRKLRARRKGGAPVHVRHMYSTRRPLRSMGTGVSADFSGFQSHRPRTTVCALSEADLIEFPCDRFMDSAGGGAGGSLRREDRLLQRFAD

SEQ ID NO: 37579 - protein, 465 aa, Homo sapiens [sequence omitted]

SEQ ID NO: 37580 - protein, 164 aa, Homo sapiens
  REGION 1..164: note = ENSP00000400174
  VARIANT 1: note = Any amino acid
XKKHQVETAFERLQQELEQQRCLLLARLRELEQQIWKERDEYITKVSEEVTRLGAQVKELEEKCQQPASELLQDVRVNQSRCEMKTFVSPEAISPDLVKKIRDFHRKILTLPEMMRMFSENLAHHLEIDSDRQPEPGSLGRQEVSEVHPAEEEPARQPPALRRP

SEQ ID NO: 37581 - protein, 396 aa, Homo sapiens
  REGION 1..396: note = ENSP00000449583
MAPVPLGPLGETYCEEHGEKIYFFCENDAEFLCVFCREGPTHQAHTVGFLDEAIQPYRDRLRSRLEALSTERDEIEDVKCQEDQKLQVLLTQIESKKHQVETAFERLQQELEQQRCLLLARLRELEQQIWKERDEYITKVSEEVTRLGAQVKELEEKCQQPASELLQDVRGTIVTCEMKTFVSPEAISPDLVKKIRDFHRKILTLPEMMRMFSENLAHHLEIDSGVITLDPQTASRSLVLSEDRKSVRYTRQKKSLPDSPLRFDGLPAVLGFPGFSSGRHRWQVDLQLGDGGGCTVGVAGEGVRRKGEMGLSAEDGVWAVIISHQQCWASTSPGTDLPLSEIPRGVRVALDYEAGQVTLHNAQTQEPIFTFTASFSGKVFPFFAVWKKGSCLTLKG

SEQ ID NO: 37582 - protein, 465 aa, Homo sapiens [sequence omitted]

SEQ ID NO: 37583 - protein, 164 aa, Homo sapiens; identical to SEQ ID NO: 37580
  REGION 1..164: note = ENSP00000389858
  VARIANT 1: note = Any amino acid

SEQ ID NO: 37584 - protein, 396 aa, Homo sapiens; identical to SEQ ID NO: 37581
  REGION 1..396: note = ENSP00000447232

SEQ ID NO: 37585 - protein, 115 aa, Homo sapiens
  REGION 1..115: note = ENSP00000447500
MPATPSLKVVHELPACTLCAGPLEDAVTIPCGHTFCRLCLPALSQMGAQSSGKILLCPLCQEEEQAETPMAPVPLGPLGETYCEEHGEKIYFFCENDAEFLCTSECRTTDGFGCA

SEQ ID NO: 37586 - protein, 465 aa, Homo sapiens
  REGION 1..465: note = ENSP00000409605
MPATPSLKVVHELPACTLCAGPLEDAVTIPCGHTFCRLCLPALSQMGAQSSGKILLCPLCQEEEQAETPMAPVPLGPLGETYCEEHGEKIYFFCENDAEFLCVFCREGPTHQAHTVGFLDEAIQPYRDRLRSRLEALSTERDEIEDVKCQEDQKLQVLLTQIESKKHQVETAFERLQQELEQQRCLLLARLRELEQQIWKERDEYITKVSEEVTRLGAQVKELEEKCQQPASELLQDVRVNQSRCEMKTFVSPEAISPDLVKKIRDFHRKILTLPEMMRMFSENLAHHLEIDSGVITLDPQTASRSLVLSEDRKSVRYTRQKKNLPDSPLRFDGLPAVLGFPGFSSGRHRWQVDLQLGDGGGCTVGVAGEGVRRKGEMGLSAEDGVWAVIISHQQCWASTSPGTDLPLSEIPRGVRVALDYEAGQVTLHNAQTQEPIFTFTASFSGKVFPFFAVWKKGSCLTLKG

SEQ ID NO: 37587 - protein, 164 aa, Homo sapiens; identical to SEQ ID NO: 37580
  REGION 1..164: note = ENSP00000403836
  VARIANT 1: note = Any amino acid

SEQ ID NO: 37588 - protein, 115 aa, Homo sapiens; identical to SEQ ID NO: 37585
  REGION 1..115: note = ENSP00000449686

SEQ ID NO: 37589 - protein, 396 aa, Homo sapiens
  REGION 1..396: note = ENSP00000448772
MAPVPLGPLGETYCEEHGEKIYFFCENDAEFLCVFCREGPTHQAHTVGFLDEAIQPYRDRLRSRLEALSTERDEIEDVKCQEDQKLQVLLTQIESKKHQVETAFERLQQELEQQRCLLLARLRELEQQIWKERDEYITKVSEEVTRLGAQVKELEEKCQQPASELLQDVRGTIVTCEMKTFVSPEAISPDLVKKIRDFHRKILTLPEMMRMFSENLAHHLEIDSGVITLDPQTASRSLVLSEDRKSVRYTRQKKNLPDSPLRFDGLPAVLGFPGFSSGRHRWQVDLQLGDGGGCTVGVAGEGVRRKGEMGLSAEDGVWAVIISHQQCWASTSPGTDLPLSEIPRGVRVALDYEAGQVTLHNAQTQEPIFTFTASFSGKVFPFFAVWKKGSCLTLKG

SEQ ID NO: 37590 - protein, 465 aa, Homo sapiens [sequence omitted]

SEQ ID NO: 37591 - protein, 164 aa, Homo sapiens; identical to SEQ ID NO: 37580
  REGION 1..164: note = ENSP00000392768
  VARIANT 1: note = Any amino acid

SEQ ID NO: 37592 - protein, 396 aa, Homo sapiens; identical to SEQ ID NO: 37581
  REGION 1..396: note = ENSP00000447725

SEQ ID NO: 37593 - protein, 465 aa, Homo sapiens [sequence omitted]

SEQ ID NO: 37594 - protein, 164 aa, Homo sapiens; identical to SEQ ID NO: 37580
  REGION 1..164: note = ENSP00000398285
  VARIANT 1: note = Any amino acid

SEQ ID NO: 37595 - protein, 115 aa, Homo sapiens; identical to SEQ ID NO: 37585
  REGION 1..115: note = ENSP00000365878

SEQ ID NO: 37596 - protein, 396 aa, Homo sapiens; identical to SEQ ID NO: 37581
  REGION 1..396: note = ENSP00000484001

SEQ ID NO: 37597 - protein, 465 aa, Homo sapiens [sequence omitted]

SEQ ID NO: 37598 - protein, 164 aa, Homo sapiens; identical to SEQ ID NO: 37580
  REGION 1..164: note = ENSP00000412755
  VARIANT 1: note = Any amino acid

SEQ ID NO: 37599 - protein, 396 aa, Homo sapiens; identical to SEQ ID NO: 37581
  REGION 1..396: note = ENSP00000450011

SEQ ID NO: 37600 - protein, 465 aa, Homo sapiens; identical to SEQ ID NO: 37586
  REGION 1..465: note = ENSP00000398224

SEQ ID NO: 37601 - protein, 164 aa, Homo sapiens; identical to SEQ ID NO: 37580
  REGION 1..164: note = ENSP00000402326
  VARIANT 1: note = Any amino acid

SEQ ID NO: 37602 - protein, 396 aa, Homo sapiens; identical to SEQ ID NO: 37589
  REGION 1..396: note = ENSP00000447004

SEQ ID NO: 37603 - protein, 115 aa, Homo sapiens; identical to SEQ ID NO: 37585
  REGION 1..115: note = ENSP00000449617

SEQ ID NO: 37604 - protein, 465 aa, Homo sapiens [sequence omitted]

SEQ ID NO: 37605 - protein, 164 aa, Homo sapiens; identical to SEQ ID NO: 37580
  REGION 1..164: note = ENSP00000391673
  VARIANT 1: note = Any amino acid

SEQ ID NO: 37606 - protein, 396 aa, Homo sapiens; identical to SEQ ID NO: 37581
  REGION 1..396: note = ENSP00000448307

SEQ ID NO: 37607 - protein, 138 aa, Homo sapiens
  REGION 1..138: note = ENSP00000400879
MASEGTNIPSPVVRQIDKQFLICSICLERYKNPKVLPCLHTFCERCLQNYIPAHSLTLSCPVCRQTSILPEKGVAALQNNFFITNLMDVLQRTPGSNAEESSILETVTAVAAGKPLSCPNHDGNVMEFYCQSCETAMC

SEQ ID NO: 37608 - protein, 744 aa, Homo sapiens
  REGION 1..744: note = ENSP00000415812
MASEGTNIPSPVVRQIDKQFLICSICLERYKNPKVLPCLHTFCERCLQNYIPAHSLTLSCPVCRQTSILPEKGVAALQNNFFITNLMDVLQRTPGSNAEESSILETVTAVAAGKPLSCPNHDGNVMEFYCQSCETAMCRECTEGEHAEHPTVPLKDVVEQHKASLQVQLDAVNKRLPEIDSALQFISEIIHQLTNQKASIVDDIHSTFDELQKTLNVRKSVLLMELEVNYGLKHKVLQSQLDTLLQGQESIKSCSNFTAQALNHGTETEVLLVKKQMSEKLNELADQDFPLHPRENDQLDFIVETEGLKKSIHNLGTILTTNAVASETVATGEGLRQTIIGQPMSVTITTKDKDGELCKTGNAYLTAELSTPDGSVADGEILDNKNGTYEFLYTVQKEGDFTLSLRLYDQHIRGSPFKLKVIRSADVSPTTEGVKRRVKSPGSGHVKQKAVKRPASMYSTGKRKENPIEDDLIFRVGTKGRNKGEFTNLQGVAASTNGKILIADSNNQCVQIFSNDGQFKSRFGIRGRSPGQLQRPTGVAVHPSGDIIIADYDNKWVSIFSSDGKFKTKIGSGKLMGPKGVSVDRNGHIIVVDNKACCVFIFQPNGKIVTRFGSRGNGDRQFAGPHFAAVNSNNEIIITDFHNHSVKVFNQEGEFMLKFGSNGEGNGQFNAPTGVAVDSNGNIIVADWGNSRIQVFDGSGSFLSYINTSADPLYGPQGLALTSDGHVVVADSGNHCFKVYRYLQ

SEQ ID NO: 37609 - protein, 526 aa, Homo sapiens
  REGION 1..526: note = ENSP00000488229
MASEGTNIPSPVVRQIDKQFLICSICLERYKNPKVLPCLHTFCERCLQNYIPAHSLTLSCPVCRQTSILPEKGVAALQNNFFITNLMDVLQRTPGSNAEESSILETVTAVAAGKPLSCPNHDGNVMEFYCQSCETAMCRECTEGEHAEHPTVPLKDVVEQHKASLQVQLDAVNKRLPEIDSALQFISEIIHQLTNQKASIVDDIHSTFDELQKTLNVRKSVLLMELEVNYGLKHKVLQSQLDTLLQGQESIKSCSNFTAQALNHGTETEVLLVKKQMSEKLNELADQDFPLHPRENDQLDFIVETEGLKKSIHNLGTILTTNAVASETVATGEGLRQTIIGQPMSVTITTKDKDGELCKTGNAYLTAELSTPDGSVADGEILDNKNGTYEFLYTVQKEGDFTLSLRLYDQHIRGSPFKLKVIRSADVSPTTEGVKRRVKSPGSGHVKQKAVKRPASMYSTGKRKENPIEDDLIFRVDGVLQAEVQWHDLSPLQPLPPGFKQFSCLGLLSSWDYRHAPPCSANFLYF

SEQ ID NO: 37610 - protein, 771 aa, Homo sapiens
  REGION 1..771: note = ENSP00000339659
MHRSGRYGTQQQRAGSKTAGPPCQWSRMASEGTNIPSPVVRQIDKQFLICSICLERYKNPKVLPCLHTFCERCLQNYIPAHSLTLSCPVCRQTSILPEKGVAALQNNFFITNLMDVLQRTPGSNAEESSILETVTAVAAGKPLSCPNHDGNVMEFYCQSCETAMCRECTEGEHAEHPTVPLKDVVEQHKASLQVQLDAVNKRLPEIDSALQFISEIIHQLTNQKASIVDDIHSTFDELQKTLNVRKSVLLMELEVNYGLKHKVLQSQLDTLLQGQESIKSCSNFTAQALNHGTETEVLLVKKQMSEKLNELADQDFPLHPRENDQLDFIVETEGLKKSIHNLGTILTTNAVASETVATGEGLRQTIIGQPMSVTITTKDKDGELCKTGNAYLTAELSTPDGSVADGEILDNKNGTYEFLYTVQKEGDFTLSLRLYDQHIRGSPFKLKVIRSADVSPTTEGVKRRVKSPGSGHVKQKAVKRPASMYSTGKRKENPIEDDLIFRVGTKGRNKGEFTNLQGVAASTNGKILIADSNNQCVQIFSNDGQFKSRFGIRGRSPGQLQRPTGVAVHPSGDIIIADYDNKWVSIFSSDGKFKTKIGSGKLMGPKGVSVDRNGHIIVVDNKACCVFIFQPNGKIVTRFGSRGNGDRQFAGPHFAAVNSNNEIIITDFHNHSVKVFNQEGEFMLKFGSNGEGNGQFNAPTGVAVDSNGNIIVADWGNSRIQVFDGSGSFLSYINTSADPLYGPQGLALTSDGHVVVADSGNHCFKVYRYLQ

SEQ ID NO: 37611 - protein, 136 aa, Homo sapiens
  REGION 1..136: note = ENSP00000487836
MASEGTNIPSPVVRQIDKQFLICSICLERYKNPKVLPCLHTFCERCLQNYIPAHSLTLSCPVCRQTSILPEKGVAALQNNFFITNLMDVLQRTPGSNAEESSILETVTAVAAGKPLSCPNHDGNVSGWDGRYCPGA

SEQ ID NO: 37612 - protein, 44 aa, Homo sapiens
  REGION 1..44: note = ENSP00000488602
MASEGTNIPSPVVRQIDKQFLICSICLERYKNPKVLPCLHTFCE

SEQ ID NO: 37613 - protein, 136 aa, Homo sapiens; identical to SEQ ID NO: 37611
  REGION 1..136: note = ENSP00000487750

SEQ ID NO: 37614 - protein, 110 aa, Homo sapiens
  REGION 1..110: note = ENSP00000400375
MDVLQRTPGSNAEESSILETVTAVAAGKPLSCPNHDGNVMEFYCQSCETAMCRECTEGEHAEHPTVPLKDVVEQHKASLQVQLDAVNKRLPEIDSALQFISEIIHQLTNQ

SEQ ID NO: 37615 - protein, 114 aa, Homo sapiens
  REGION 1..114: note = ENSP00000488751
  VARIANT 1: note = Any amino acid
XKIGSGKLMGPKGVSVDRNGHIIVVDNKACCVFIFQPNGKIVTRFGSRGNGDRQFAGPHFAAVNSNNEIIITDFHNHSVKVLQAHELLLTFNCFYGEIGLRENNAILTYGTKGS

SEQ ID NO: 37616 - protein, 539 aa, Homo sapiens
  REGION 1..539: note = ENSP00000409182
MATSAPLRSLEEEVTCSICLDYLRDPVTIDCGHVFCRSCTTDVRPISGSRPVCPLCKKPFKKENIRPVWQLASLVENIERLKVDKGRQPGEVTREQQDAKLCERHREKLHYYCEDDGKLLCVMCRESREHRPHTAVLMEKAAQPHREKILNHLSTLRRDRDKIQGFQAKGEADILAALKKLQDQRQYIVAEFEQGHQFLREREEHLLEQLAKLEQELTEGREKFKSRGVGELARLALVISELEGKAQQPAAELMQDTRDFLNRYPRKKFWVGKPIARVVKKKTGEFSDKLLSLQRGLREFQGKLLRDLEYKTVSVTLDPQSASGYLQLSEDWKCVTYTSLYKSAYLHPQQFDCEPGVLGSKGFTWGKVYWEVEVEREGWSEDEEEGDEEEEGEEEEEEEEAGYGDGYDDWETDEDEESLGDEEEEEEEEEEEVLESCMVGVARDSVKRKGDLSLRPEDGVWALRLSSSGIWANTSPEAELFPALRPRRVGIALDYEGGTVTFTNAESQELIYTFTATFTRRLVPFLWLKWPGTRLLLRP

SEQ ID NO: 37617 - protein, 539 aa, Homo sapiens; identical to SEQ ID NO: 37616
  REGION 1..539: note = ENSP00000392805

SEQ ID NO: 37618 - protein, 539 aa, Homo sapiens; identical to SEQ ID NO: 37616
  REGION 1..539: note = ENSP00000390258

SEQ ID NO: 37619 - protein, 248 aa, Homo sapiens
  REGION 1..248: note = ENSP00000402135
MATSAPLRSLEEEVTCSICLDYLRDPVTIDCGHVFCRSCTTDVRPISGSRPVCPLCKKPFKKENIRPVWQLASLVENIERLKVDKGRQPGEVTREQQDAKLCERHREKLHYYCEDDGKLLCVMCRESREHRPHTAVLMEKAAQPHREKILNHLSTLRRDRDKIQGFQAKGEADILAALKKLQDQRQYIVAEFEQGHQFLREREEHLLEQLAKLEQELTEGREKFKSRGVGELARLALVISELEGKAQQ

SEQ ID NO: 37620 - protein, 159 aa, Homo sapiens
  REGION 1..159: note = ENSP00000393753
MATSAPLRSLEEEVTCSICLDYLRDPVTIDCGHVFCRSCTTDVRPISGSRPVCPLCKKPFKKENIRPVWQLEKILNHLSTLRRDRDKIQGFQAKGEADILAALKKLQDQRQYIVAEFEQGHQFLREREEHLLEQLAKLEQELTEGREKFKSRGVGELAR

SEQ ID NO: 37621 - protein, 157 aa, Homo sapiens
  REGION 1..157: note = ENSP00000412641
MATSAPLRSLEEEVTCSICLDYLRDPVTIDCGHVFCRSCTTDVRPISGSRPVCPLCKKPFKKENIRPVWQLASLVENIERLKVDKGRQPGEVTREQQDAKLCERHREKLHYYCEDDGKLLCVMCRESREHRPHTAVLMEKAAQPHREKILNHLSTLR

SEQ ID NO: 37622 - protein, 122 aa, Homo sapiens
  REGION 1..122: note = ENSP00000405923
MATSAPLRSLEEEVTCSICLDYLRDPVTIDCGHVFCRSCTTDVRPISGSRPVCPLCKKPFKKENIRPVWQLASLVENIERLKVDKGRQPGEVTREQQDAKLCERHREKLHYYCEDDGKLLCV

SEQ ID NO: 37623 - protein, 539 aa, Homo sapiens; identical to SEQ ID NO: 37616
  REGION 1..539: note = ENSP00000394421

SEQ ID NO: 37624 - protein, 539 aa, Homo sapiens; identical to SEQ ID NO: 37616
  REGION 1..539: note = ENSP00000415755

SEQ ID NO: 37625 - protein, 539 aa, Homo sapiens; identical to SEQ ID NO: 37616
  REGION 1..539: note = ENSP00000414248

SEQ ID NO: 37626 - protein, 248 aa, Homo sapiens; identical to SEQ ID NO: 37619
  REGION 1..248: note = ENSP00000391602

SEQ ID NO: 37627 - protein, 159 aa, Homo sapiens; identical to SEQ ID NO: 37620
  REGION 1..159: note = ENSP00000416276

SEQ ID NO: 37628 - protein, 157 aa, Homo sapiens; identical to SEQ ID NO: 37621
  REGION 1..157: note = ENSP00000391031

SEQ ID NO: 37629 - protein, 122 aa, Homo sapiens; identical to SEQ ID NO: 37622
  REGION 1..122: note = ENSP00000388005

SEQ ID NO: 37630 - protein, 539 aa, Homo sapiens; identical to SEQ ID NO: 37616
  REGION 1..539: note = ENSP00000394371

SEQ ID NO: 37631 - protein, 539 aa, Homo sapiens; identical to SEQ ID NO: 37616
  REGION 1..539: note = ENSP00000407876

SEQ ID NO: 37632 - protein, 539 aa, Homo sapiens; identical to SEQ ID NO: 37616
  REGION 1..539: note = ENSP00000416737

SEQ ID NO: 37633 - protein, 248 aa, Homo sapiens; identical to SEQ ID NO: 37619
  REGION 1..248: note = ENSP00000389386

SEQ ID NO: 37634 - protein, 157 aa, Homo sapiens; identical to SEQ ID NO: 37621
  REGION 1..157: note = ENSP00000405710

SEQ ID NO: 37635 - protein, 122 aa, Homo sapiens; identical to SEQ ID NO: 37622
  REGION 1..122: note = ENSP00000403765

SEQ ID NO: 37636 - protein, 159 aa, Homo sapiens; identical to SEQ ID NO: 37620
  REGION 1..159: note = ENSP00000400655

SEQ ID NO: 37637 - protein, 539 aa, Homo sapiens; identical to SEQ ID NO: 37616
  REGION 1..539: note = ENSP00000395491

SEQ ID NO: 37638 - protein, 539 aa, Homo sapiens; identical to SEQ ID NO: 37616
  REGION 1..539: note = ENSP00000410446

SEQ ID NO: 37639 - protein, 539 aa, Homo sapiens; identical to SEQ ID NO: 37616
  REGION 1..539: note = ENSP00000391879

SEQ ID NO: 37640 - protein, 248 aa, Homo sapiens; identical to SEQ ID NO: 37619
  REGION 1..248: note = ENSP00000413673

SEQ ID NO: 37641 - protein, 157 aa, Homo sapiens; identical to SEQ ID NO: 37621
  REGION 1..157: note = ENSP00000387530

SEQ ID NO: 37642 - protein, 122 aa, Homo sapiens; identical to SEQ ID NO: 37622
  REGION 1..122: note = ENSP00000400920

SEQ ID NO: 37643 - protein, 539 aa, Homo sapiens; identical to SEQ ID NO: 37616
  REGION 1..539: note = ENSP00000373102

SEQ ID NO: 37644 - protein, 539 aa, Homo sapiens; identical to SEQ ID NO: 37616
  REGION 1..539: note = ENSP00000331131

SEQ ID NO: 37645 - protein, 539 aa, Homo sapiens; identical to SEQ ID NO: 37616
  REGION 1..539: note = ENSP00000379806

SEQ ID NO: 37646 - protein, 248 aa, Homo sapiens; identical to SEQ ID NO: 37619
  REGION 1..248: note = ENSP00000390908

SEQ ID NO: 37647 - protein, 157 aa, Homo sapiens; identical to SEQ ID NO: 37621
  REGION 1..157: note = ENSP00000412165

SEQ ID NO: 37648 - protein, 122 aa, Homo sapiens; identical to SEQ ID NO: 37622
  REGION 1..122: note = ENSP00000405526

SEQ ID NO: 37649 - protein, 539 aa, Homo sapiens; identical to SEQ ID NO: 37616
  REGION 1..539: note = ENSP00000396188

SEQ ID NO: 37650 - protein, 539 aa, Homo sapiens; identical to SEQ ID NO: 37616
  REGION 1..539: note = ENSP00000407294

SEQ ID NO: 37651 - protein, 539 aa, Homo sapiens; identical to SEQ ID NO: 37616
  REGION 1..539: note = ENSP00000398545

SEQ ID NO: 37652 - protein, 248 aa, Homo sapiens; identical to SEQ ID NO: 37619
  REGION 1..248: note = ENSP00000395820

SEQ ID NO: 37653 - protein, 159 aa, Homo sapiens; identical to SEQ ID NO: 37620
  REGION 1..159: note = ENSP00000403395

SEQ ID NO: 37654 - protein, 157 aa, Homo sapiens; identical to SEQ ID NO: 37621
  REGION 1..157: note = ENSP00000407035

SEQ ID NO: 37655 - protein, 122 aa, Homo sapiens; identical to SEQ ID NO: 37622
  REGION 1..122: note = ENSP00000396089

SEQ ID NO: 37656 - protein, 539 aa, Homo sapiens; identical to SEQ ID NO: 37616
  REGION 1..539: note = ENSP00000402395

SEQ ID NO: 37657 - protein, 539 aa, Homo sapiens; identical to SEQ ID NO: 37616
  REGION 1..539: note = ENSP00000408233

SEQ ID NO: 37658 - protein, 539 aa, Homo sapiens; identical to SEQ ID NO: 37616
  REGION 1..539: note = ENSP00000406707

SEQ ID NO: 37659 - protein, 248 aa, Homo sapiens; identical to SEQ ID NO: 37619
  REGION 1..248: note = ENSP00000397048

SEQ ID NO: 37660 - protein, 159 aa, Homo sapiens; identical to SEQ ID NO: 37620
  REGION 1..159: note = ENSP00000402684

SEQ ID NO: 37661 - protein, 157 aa, Homo sapiens; identical to SEQ ID NO: 37621
  REGION 1..157: note = ENSP00000402990

SEQ ID NO: 37662 - protein, 122 aa, Homo sapiens; identical to SEQ ID NO: 37622
  REGION 1..122: note = ENSP00000393827

SEQ ID NO: 37663 - protein, 539 aa, Homo sapiens; identical to SEQ ID NO: 37616
  REGION 1..539: note = ENSP00000393011

SEQ ID NO: 37664 - protein, 539 aa, Homo sapiens; identical to SEQ ID NO: 37616
  REGION 1..539: note = ENSP00000389203

SEQ ID NO: 37665 - protein, 539 aa, Homo sapiens; identical to SEQ ID NO: 37616
  REGION 1..539: note = ENSP00000415328

SEQ ID NO: 37666 - protein, 248 aa, Homo sapiens; identical to SEQ ID NO: 37619
  REGION 1..248: note = ENSP00000412838

SEQ ID NO: 37667 - protein, 157 aa, Homo sapiens; identical to SEQ ID NO: 37621
  REGION 1..157: note = ENSP00000416664

SEQ ID NO: 37668 - protein, 122 aa, Homo sapiens; identical to SEQ ID NO: 37622
  REGION 1..122: note = ENSP00000403887

SEQ ID NO: 37669 - protein, 159 aa, Homo sapiens; identical to SEQ ID NO: 37620
  REGION 1..159: note = ENSP00000405791

SEQ ID NO: 37670 - protein, 493 aa, Homo sapiens
  REGION 1..493: note = ENSP00000369373
MASGILVNVKEEVTCPICLELLTQPLSLDCGHSFCQACLTANHKKSMLDKGESSCPVCRISYQPENIRPNRHVANIVEKLREVKLSPEGQKVDHCARHGEKLLLFCQEDGKVICWLCERSQEHRGHHTFLTEEVAREYQVKLQAALEMLRQKQQEAEELEADIREEKASWKTQIQYDKTNVLADFEQLRDILDWEESNELQNLEKEEEDILKSLTNSETEMVQQTQSLRELISDLEHRLQGSVMELLQGVDGVIKRTENVTLKKPETFPKNQRRVFRAPDLKGMLEVFRELTDVRRYWVDVTVAPNNISCAVISEDKRQVSSPKPQIIYGARGTRYQTFVNFNYCTGILGSQSITSGKHYWEVDVSKKTAWILGVCAGFQPDAMCNIEKNENYQPKYGYWVIGLEEGVKCSAFQDSSFHTPSVPFIVPLSVIICPDRVGVFLDYEACTVSFFNITNHGFLIYKFSHCSFSQPVFPYLNPRKCGVPMTLCSPSS

SEQ ID NO: 37671 - protein, 326 aa, Homo sapiens
  REGION 1..326: note = ENSP00000369366
MASGILVNVKEEVTCPICLELLTQPLSLDCGHSFCQACLTANHKKSMLDKGESSCPVCRISYQPENIRPNRHVANIVEKLREVKLSPEGQKVDHCARHGEKLLLFCQEDGKVICWLCERSQEHRGHHTFLTEEVAREYQVKLQAALEMLRQKQQEAEELEADIREEKASWKTQIQYDKTNVLADFEQLRDILDWEESNELQNLEKEEEDILKSLTNSETEMVQQTQSLRELISDLEHRLQGSVMELLQGVDGVIKRTENVTLKKPETFPKNQRRVFRAPDLKGMLEVFRELTDVRRYWGWSAMARSRFTATSTSQIQAILLPQPPK

SEQ ID NO: 37672 - protein, 271 aa, Homo sapiens
  REGION 1..271: note = ENSP00000393052
MASGILVNVKEEVTCPICLELLTQPLSLDCGHSFCQACLTANHKKSMLDKGESSCPVCRISYQPENIRPNRHVANIVEKLREVKLSPEGQKVDHCARHGEKLLLFCQEDGKVICWLCERSQEHRGHHTFLTEEVAREYQVKLQAALEMLRQKQQEAEELEADIREEKASWKTQIQYDKTNVLADFEQLRDILDWEESNELQNLEKEEEDILKSLTNSETEMVQQTQSLRELISDLEHRLQGSVMELLQDGERDLEEARNFSKKSKESVSSS

SEQ ID NO: 37673 - protein, 347 aa, Homo sapiens
  REGION 1..347: note = ENSP00000380058
MASGILVNVKEEVTCPICLELLTQPLSLDCGHSFCQACLTANHKKSMLDKGESSCPVCRISYQPENIRPNRHVANIVEKLREVKLSPEGQKVDHCARHGEKLLLFCQEDGKVICWLCERSQEHRGHHTFLTEEVAREYQVKLQAALEMLRQKQQEAEELEADIREEKASWKTQIQYDKTNVLADFEQLRDILDWEESNELQNLEKEEEDILKSLTNSETEMVQQTQSLRELISDLEHRLQGSVMELLQGVDGVIKRTENVTLKKPETFPKNQRRVFRAPDLKGMLEVFRELTDVRRYWGKEKSHYHKPPCGLSLLLSLSFRILCSLLGSCFKIYDSPSKTHITYPSL

SEQ ID NO: 37674 - protein, 187 aa, Homo sapiens
  REGION 1..187: note = ENSP00000398196
  VARIANT 1: note = Any amino acid
XGHHTFLTEEVAREYQVKLQAALEMLRQKQQEAEELEADIREEKASWKTQIQYDKTNVLADFEQLRDILDWEESNELQNLEKEEEDILKSLTNSETEMVQQTQSLRELISDLEHRLQGSVMELLQGVDGVIKRADRCPTLLGLECNGTISVHCNLHLSDSSNSPASASQVAGITGAHHHPWLNLYFQ

SEQ ID NO: 37675 - protein, 209 aa, Homo sapiens
  REGION 1..209: note = ENSP00000388031
MASGILVNVKEEVTCPICLELLTQPLSLDCGHSFCQACLTANHKKSMLDKGESSCPVCRISYQPENIRPNRHVANIVEKLREVKLSPEGQKVDHCARHGEKLLLFCQEDGKVICWLCERSQEHRGHHTFLTEEVAREYQVKLQAALEMLRQKQQEAEELEADIREEKASWKTQIQYDKTNVLADFEQLRDILDWEESNELQNLEKEEED

SEQ ID NO: 37676 - protein, 72 aa, Homo sapiens
  REGION 1..72: note = ENSP00000388150
MASGILVNVKEEVTCPICLELLTQPLSLDCGHSFCQACLTANHKKSMLDKGESSCPVCRISYQPENIRPNRH

SEQ ID NO: 37677 - protein, 728 aa, Homo sapiens
  REGION 1..728: note = ENSP00000282369
MSESGEMSEFGYIMELIAKGKVTIKNIERELICPACKELFTHPLILPCQHSICHKCVKELLLTLDDSFNDVGSDNSNQSSPRLRLPSPSMDKIDRINRPGWKRNSLTPRTTVFPCPGCEHDVDLGERGINGLFRNFTLETIVERYRQAARAATAIMCDLCKPPPQESTKSCMDCSASYCNECFKIHHPWGTIKAQHEYVGPTTNFRPKILMCPEHETERINMYCELCRRPVCHLCKLGGNHANHRVTTMSSAYKTLKEKLSKDIDYLIGKESQVKSQISELNLLMKETECNGERAKEEAITHFEKLFEVLEERKSSVLKAIDSSKKLRLDKFQTQMEEYQGLLENNGLVGYAQEVLKETDQSCFVQTAKQLHLRIQKATESLKSFRPAAQTSFEDYVVNTSKQTELLGELSFFSSGIDVPEINEEQSKVYNNALINWHHPEKDKADSYVLEYRKINRDDEMSWNEIEVCGTSKIIQDLENSSTYAFRVRAYKGSICSPCSRELILHTPPAPVFSFLFDEKCGYNNEHLLLNLKRDRVESRAGFNLLLAAERIQVGYYTSLDYIIGDTGITKGKHFWAFRVEPYSYLVKVGVASSDKLQEWLRSPRDAVSPRYEQDSGHDSGSEDACFDSSQPFTLVTIGMQKFFIPKSPTSSNEPENRVLPMPTSIGIFLDCDKGKVDFYDMDQMKCLYERQVDCSHTLYPAFALMGSGGIQLEEPITAKYLEYQEDM

SEQ ID NO: 37678 - protein, 716 aa, Homo sapiens
  REGION 1..716: note = ENSP00000423934
MEGDGSDSPVTIKNIERELICPACKELFTHPLILPCQHSICHKCVKELLLTLDDSFNDVGSDNSNQSSPRLRLPSPSMDKIDRINRPGWKRNSLTPRTTVFPCPGCEHDVDLGERGINGLFRNFTLETIVERYRQAARAATAIMCDLCKPPPQESTKSCMDCSASYCNECFKIHHPWGTIKAQHEYVGPTTNFRPKILMCPEHETERINMYCELCRRPVCHLCKLGGNHANHRVTTMSSAYKTLKEKLSKDIDYLIGKESQVKSQISELNLLMKETECNGERAKEEAITHFEKLFEVLEERKSSVLKAIDSSKKLRLDKFQTQMEEYQGLLENNGLVGYAQEVLKETDQSCFVQTAKQLHLRIQKATESLKSFRPAAQTSFEDYVVNTSKQTELLGELSFFSSGIDVPEINEEQSKVYNNALINWHHPEKDKADSYVLEYRKINRDDEMSWNEIEVCGTSKIIQDLENSSTYAFRVRAYKGSICSPCSRELILHTPPAPVFSFLFDEKCGYNNEHLLLNLKRDRVESRAGFNLLLAAERIQVGYYTSLDYIIGDTGITKGKHFWAFRVEPYSYLVKVGVASSDKLQEWLRSPRDAVSPRYEQDSGHDSGSEDACFDSSQPFTLVTIGMQKFFIPKSPTSSNEPENRVLPMPTSIGIFLDCDKGKVDFYDMDQMKCLYERQVDCSHTLYPAFALMGSGGIQLEEPITAKYLEYQEDM

SEQ ID NO: 37679 - protein, 573 aa, Homo sapiens
  REGION 1..573: note = ENSP00000424259
MCDLCKPPPQESTKSCMDCSASYCNECFKIHHPWGTIKAQHEYVGPTTNFRPKILMCPEHETERINMYCELCRRPVCHLCKLGGNHANHRVTTMSSAYKTLKEKLSKDIDYLIGKESQVKSQISELNLLMKETECNGERAKEEAITHFEKLFEVLEERKSSVLKAIDSSKKLRLDKFQTQMEEYQGLLENNGLVGYAQEVLKETDQSCFVQTAKQLHLRIQKATESLKSFRPAAQTSFEDYVVNTSKQTELLGELSFFSSGIDVPEINEEQSKVYNNALINWHHPEKDKADSYVLEYRKINRDDEMSWNEIEVCGTSKIIQDLENSSTYAFRVRAYKGSICSPCSRELILHTPPAPVFSFLFDEKCGYNNEHLLLNLKRDRVESRAGFNLLLAAERIQVGYYTSLDYIIGDTGITKGKHFWAFRVEPYSYLVKVGVASSDKLQEWLRSPRDAVSPRYEQDSGHDSGSEDACFDSSQPFTLVTIGMQKFFIPKSPTSSNEPENRVLPMPTSIGIFLDCDKGKVDFYDMDQMKCLYERQVDCSHTLYPAFALMGSGGIQLEEPITAKYLEYQEDM

SEQ ID NO: 37680 - protein, 170 aa, Homo sapiens
  REGION 1..170: note = ENSP00000424743
MEGDGSDSPVTIKNIERELICPACKELFTHPLILPCQHSICHKCVKELLLTLDDSFNDVGSDNSNQSSPRLRLPSPSMDKIDRINRPASQRRSVGWRGWKRNSLTPRTTVFPCPGCEHDVDLGERGINGLFRNFTLETIVERYRQAARAATAIMCDLCKPPPQESTKSCM

SEQ ID NO: 37681 - protein, 60 aa, Homo sapiens
  REGION 1..60: note = ENSP00000368938
MSESGEMSEFGYIMELIAKGKMPDWRRGYRCRQGCGKTTELATATDFSQTGNKSGKHFKT

SEQ ID NO: 37682 - protein, 61 aa, Homo sapiens
  REGION 1..61: note = ENSP00000368937
MSESGEMSEFGYIMELIAKGKASAMGLQQTHEHSRLTSKGGEARCPFEISEVGKQSLPRRT

SEQ ID NO: 37683 - protein, 323 aa, Homo sapiens
  REGION 1..323: note = ENSP00000444313
MHNFEEELTCPICYSIFEDPRVLPCSHTFCRNCLENILQASGNFYIWRPLRIPLKCPNCRSITEIAPTGIESLPVNFALRAIIEKYQQEDHPDIVTCPEHYRQPLNVYCLLDKKLVCGHCLTIGQHHGHPIDDLQSAYLKEKDTPQKLLEQLTDTHWTDLTHLIEKLKEQKSHSEKMIQGDKEAVLQYFKELNDTLEQKKKSFLTALCDVGNLINQEYTPQIERMKEIREQQLELMALTISLQEESPLKFLEKVDDVRQHVQILKQRPLPEVQPVEIYPRVSKILKEEWSRTEIGQIKNVLIPKMKISPKRMSCSWPDEGTDK

SEQ ID NO: 37684 - protein, 68 aa, Homo sapiens
  REGION 1..68: note = ENSP00000420451
MVQPSLEMHNFEEELTCPICYSIFEDPRVLPCSHTFCRNCLENILQASGNFYIWRPLRIPLKCPNCRS

SEQ ID NO: 37685 - protein, 111 aa, Homo sapiens
  REGION 1..111: note = ENSP00000417605
MHNFEEELTCPICYSIFEDPRVLPCSHTFCRNCLENILQASGNFYIWRPLRIPLKCPNCRSITEIAPTGIESLPVNFALRAIIEKYQQEDHPDIVTCPEHYRQPLNVYCLL

SEQ ID NO: 37686 - protein, 114 aa, Homo sapiens
  REGION 1..114: note = ENSP00000418699
MHNFEEELTCPICYSIFEDPRVLPCSHTFCRNCLENILQASGNFYIWRPLRIPLKCPNCRSITEIAPTGIESLPVNFALRAIIEKYQQEDHPDIVTCPEHYRQPLNVYCLLDKK

SEQ ID NO: 37687 - protein, 179 aa, Homo sapiens
  REGION 1..179: note = ENSP00000418856
MRRRIRIKDSGGVGEECIQPPNHEINKEMHNFEEELTCPICYSIFEDPRVLPCSHTFCRNCLENILQASGNFYIWRPLRIPLKCPNCRSITEIAPTGIESLPVNFALRAIIEKYQQEDHPDIVTCPEHYRQPLNVYCLLDKKLVCGHCLTIGQHHGHPIDDLQSAYLKEKDTPQKLLEQ

SEQ ID NO: 37688 - protein, 155 aa, Homo sapiens
  REGION 1..155: note = ENSP00000420520
MHNFEEELTCPICYSIFEDPRVLPCSHTFCRNCLENILQASGNFYIWRPLRIPLKCPNCRSITEIAPTGIESLPVNFALRAIIEKYQQEDHPDIVTCPEHYRQPLNVYCLLDKKLVCGHCLTIGQHHGHPIDDLQSAYLKEKDTPQKLLEQLTDT

SEQ ID NO: 37689 - protein, 177 aa, Homo sapiens
  REGION 1..177: note = ENSP00000417081
MHNFEEELTCPICYSIFEDPRVLPCSHTFCRNCLENILQASGNFYIWRPLRIPLKCPNCRSITEIAPTGIESLPVNFALRAIIEKYQQEDHPDIVTCPEHYRQPLNVYCLLDKKLVCGHCLTIGQHHGHPIDDLQSAYLKEKDTPQKLLEQLTDTHWTDLTHLIEKLKEQKSHSEKM

SEQ ID NO: 37690 - protein, 403 aa, Homo sapiens
  REGION 1..403: note = ENSP00000311219
MHNFEEELTCPICYSIFEDPRVLPCSHTFCRNCLENILQASGNFYIWRPLRIPLKCPNCRSITEIAPTGIESLPVNFALRAIIEKYQQEDHPDIVTCPEHYRQPLNVYCLLDKKLVCGHCLTIGQHHGHPIDDLQSAYLKEKDTPQKLLEQLTDTHWTDLTHLIEKLKEQKSHSEKMIQGDKEAVLQYFKELNDTLEQKKKSFLTALCDVGNLINQEYTPQIERMKEIREQQLELMALTISLQEESPLKFLEKVDDVRQHVQILKQRPLPEVQPVEIYPRVSKILKEEWSRTEIGQIKNVLIPKMKISPKRMSCSWPGKDEKEVEFLKILNIVVVTLISVILMSILFFNQHIITFLSEITLIWFSEASLSVYQSLSNSLHKVKNILCHIFYLLKEFVWKIVSH

SEQ ID NO: 37691 - protein, 475 aa, Homo sapiens
  REGION 1..475: note = ENSP00000291416
MACSLKDELLCSICLSIYQDPVSLGCEHYFCRRCITEHWVRQEAQGARDCPECRRTFAEPALAPSLKLANIVERYSSFPLDAILNARRAARPCQAHDKVKLFCLTDRALLCFFCDEPALHEQHQVTGIDDAFDELQRELKDQLQALQDSEREHTEALQLLKRQLAETKSSTKSLRTTIGEAFERLHRLLRERQKAMLEELEADTARTLTDIEQKVQRYSQQLRKVQEGAQILQERLAETDRHTFLAGVASLSERLKGKIHETNLTYEDFPTSKYTGPLQYTIWKSLFQDIHPVPAALTLDPGTAHQRLILSDDCTIVAYGNLHPQPLQDSPKRFDVEVSVLGSEAFSSGVHYWEVVVAEKTQWVIGLAHEAASRKGSIQIQPSRGFYCIVMHDGNQYSACTEPWTRLNVRDKLDKVGVFLDYDQGLLIFYNADDMSWLYTFREKFPGKLCSYFSPGQSHANGKNVQPLRINTVRI

SEQ ID NO: 37692 - protein, 354 aa, Homo sapiens
  REGION 1..354: note = ENSP00000441173
MPEKTAVDQPWTQALRELKDQLQALQDSEREHTEALQLLKRQLAETKSSTKSLRTTIGEAFERLHRLLRERQKAMLEELEADTARTLTDIEQKVQRYSQQLRKVQEGAQILQERLAETDRHTFLAGVASLSERLKGKIHETNLTYEDFPTSKYTGPLQYTIWKSLFQDIHPVPAALTLDPGTAHQRLILSDDCTIVAYGNLHPQPLQDSPKRFDVEVSVLGSEAFSSGVHYWEVVVAEKTQWVIGLAHEAASRKGSIQIQPSRGFYCIVMHDGNQYSACTEPWTRLNVRDKLDKVGVFLDYDQGLLIFYNADDMSWLYTFREKFPGKLCSYFSPGQSHANGKNVQPLRINTVRI

SEQ ID NO: 37693 - protein, 781 aa, Homo sapiens
  REGION 1..781: note = ENSP00000412124
MEEELKCPVCGSLFREPIILPCSHNVCLPCARTIAVQTPDGEQHLPQPLLLSRGSGLQAGAAAAASLEHDAAAGPACGGAGGSAAGGLGGGAGGGGDHADKLSLYSETDSGYGSYTPSLKSPNGVRVLPMVPAPPGSSAAAARGAACSSLSSSSSSITCPQCHRSASLDHRGLRGFQRNRLLEAIVQRYQQGRGAVPGTSAAAAVAICQLCDRTPPEPAATLCEQCDVLYCSACQLKCHPSRGPFAKHRLVQPPPPPPPPAEAASGPTGTAQGAPSGGGGCKSPGGAGAGATGGSTARKFPTCPEHEMENYSMYCVSCRTPVCYLCLEEGRHAKHEVKPLGAMWKQHKAQLSQALNGVSDKAKEAKEFLVQLKNILQQIQENGLDYEACLVAQCDALVDALTRQKAKLLTKVTKEREHKLKMVWDQINHCTLKLRQSTGLMEYCLEVIKENDPSGFLQISDALIKRVQVSQEQWVKGALEPKVSAEFDLTLDSEPLLQAIHQLDFIQMKLPPVPLLQLEKCCTRNNSVTLAWRMPPFTHSPVDGYILELDDGAGGQFREVYVGKETLCTIDGLHFNSTYNARVKAFNSSGVGPYSKTVVLQTSDVAWFTFDPNSGHRDIILSNDNQTATCSSYDDRVVLGTAAFSKGVHYWELHVDRYDNHPDPAFGVARASVVKDMMLGKDDKAWAMYVDNNRSWFMHCNSHTNRTEGGVCKGATVGVLLDLNKHTLTFFINGQQQGPTAFSHVDGVFMPALSLNRNVQVTLHTGLEVPTNLGRPKLSGN

SEQ ID NO: 37694 - protein, 721 aa, Homo sapiens
  REGION 1..721: note = ENSP00000400163
MEEELKCPVCGSLFREPIILPCSHNVCLPCARTIAVQTPDGGSAAGGLGGGAGGGGDHADKLSLYSETDSGYGSYTPSLKSPNGVRVLPMVPAPPGSSAAAARGAACSSLSSSSSSITCPQCHRSASLDHRGLRGFQRNRLLEAIVQRYQQGRGAVPGTSAAAAVAICQLCDRTPPEPAATLCEQCDVLYCSACQLKCHPSRGPFAKHRLGAPSGGGGCKSPGGAGAGATGGSTARKFPTCPEHEMENYSMYCVSCRTPVCYLCLEEGRHAKHEVKPLGAMWKQHKAQLSQALNGVSDKAKEAKEFLVQLKNILQQIQENGLDYEACLVAQCDALVDALTRQKAKLLTKVTKEREHKLKMVWDQINHCTLKLRQSTGLMEYCLEVIKENDPSGFLQISDALIKRVQVSQEQWVKGALEPKVSAEFDLTLDSEPLLQAIHQLDFIQMKCRVPPVPLLQLEKCCTRNNSVTLAWRMPPFTHSPVDGYILELDDGAGGQFREVYVGKETLCTIDGLHFNSTYNARVKAFNSSGVGPYSKTVVLQTSDVAWFTFDPNSGHRDIILSNDNQTATCSSYDDRVVLGTAAFSKGVHYWELHVDRYDNHPDPAFGVARASVVKDMMLGKDDKAWAMYVDNNRSWFMHCNSHTNRTEGGVCKGATVGVLLDLNKHTLTFFINGQQQGPTAFSHVDGVFMPALSLNRNVQVTLHTGLEVPTNLGRPKLSGN

SEQ ID NO: 37695 - protein, 783 aa, Homo sapiens
  REGION 1..783: note = ENSP00000355613
MEEELKCPVCGSLFREPIILPCSHNVCLPCARTIAVQTPDGEQHLPQPLLLSRGSGLQAGAAAAASLEHDAAAGPACGGAGGSAAGGLGGGAGGGGDHADKLSLYSETDSGYGSYTPSLKSPNGVRVLPMVPAPPGSSAAAARGAACSSLSSSSSSITCPQCHRSASLDHRGLRGFQRNRLLEAIVQRYQQGRGAVPGTSAAAAVAICQLCDRTPPEPAATLCEQCDVLYCSACQLKCHPSRGPFAKHRLVQPPPPPPPPAEAASGPTGTAQGAPSGGGGCKSPGGAGAGATGGSTARKFPTCPEHEMENYSMYCVSCRTPVCYLCLEEGRHAKHEVKPLGAMWKQHKAQLSQALNGVSDKAKEAKEFLVQLKNILQQIQENGLDYEACLVAQCDALVDALTRQKAKLLTKVTKEREHKLKMVWDQINHCTLKLRQSTGLMEYCLEVIKENDPSGFLQISDALIKRVQVSQEQWVKGALEPKVSAEFDLTLDSEPLLQAIHQLDFIQMKCRVPPVPLLQLEKCCTRNNSVTLAWRMPPFTHSPVDGYILELDDGAGGQFREVYVGKETLCTIDGLHFNSTYNARVKAFNSSGVGPYSKTVVLQTSDVAWFTFDPNSGHRDIILSNDNQTATCSSYDDRVVLGTAAFSKGVHYWELHVDRYDNHPDPAFGVARASVVKDMMLGKDDKAWAMYVDNNRSWFMHCNSHTNRTEGGVCKGATVGVLLDLNKHTLTFFINGQQQGPTAFSHVDGVFMPALSLNRNVQVTLHTGLEVPTNLGRPKLSGN

SEQ ID NO: 37696 - protein, 236 aa, Homo sapiens
  REGION 1..236: note = ENSP00000346564
MAAKQPPPLMKKHSQTDLVSRLKTRKILGVGGEDDDGEVHRSKISQVLGNEIKFTIREPLGLRVWQFVSAVLFSGIAIMALAFPDQLYDAVFDGAQVTSKTPIRLYGGALLKVETESDRGEVTCLRSQLVSGEAKIGTQAIQLGRTKDGVSETSPASALLLAFSLIQTWLQPLGWDWPPYLPFNPVLPCCQKELSRKHMSPQPSLAGTQPLQETKLPPTDHRTSKTHHRHLLLFLP

SEQ ID NO: 37697 - protein, 189 aa, Homo sapiens
  REGION 1..189: note = ENSP00000379009
MAAKQPPPLMKKHSQTDLVSRLKTRKILGVGGEDDDGEVHRSKISQVLGNEIKFTIREPLGLRVWQFVSAVLFSGIAIMALAFPDQLYDAVFDGAQVTSKTPIRLYGGALLSISLIMWNALYTAEKVIIRWTLLTEACYFGVQFLVVTATLAETGLMSLGILLLLVSRLLFVVISIYYYYQVGRRPKKA

SEQ ID NO: 37698 - protein, 189 aa, Homo sapiens; identical to SEQ ID NO: 37697
  REGION 1..189: note = ENSP00000436152

SEQ ID NO: 37699 - protein, 189 aa, Homo sapiens; identical to SEQ ID NO: 37697
  REGION 1..189: note = ENSP00000433474

SEQ ID NO: 37700 - protein, 64 aa, Homo sapiens
  REGION 1..64: note = ENSP00000437243
MAAKQPPPLMKKHSQTDLVSRLKTRKILGVGGEDDDGEVHRSKGLAVRLCCALLRHCHHGACLP

SEQ ID NO: 37701 - protein, 158 aa, Homo sapiens
  REGION 1..158: note = ENSP00000433454
MAAKQPPPLMKKHSQTDLVSRLKTRKILGVGGEDDDGEVHRSKISQVLGNEIKFTIREPLGLRVWQFVSAVLFSGIAIMALAFPDQLYDAVFDGAQVTSKTPIRLYGGALLSISLIMWNALYTAEKVIIRWTLLTEACYFGVQFLVVTATLAETGLMS

SEQ ID NO: 37702 - protein, 91 aa, Homo sapiens
  REGION 1..91: note = ENSP00000437258
MAAKQPPPLMKKHSQTDLVSRLKTRKILGVGGEDDDGEVHRSKGLAVRLCCALLRHCHHGISLIMWNALYTAEKVIIRWTLLTEACYFGVQ

SEQ ID NO: 37703 - protein, 154 aa, Homo sapiens
  REGION 1..154: note = ENSP00000475501
MAAKQPPPLMKKHSQTDLVSRLKTRKILGVGGEDDDGEVHRSKISQVLGNEIKFTIREPLGLRVWQFVSAVLFSGIAIMALAFPDQLYDAVFDGAQVTSKTPIRLYGGALLNAAPTPRPLMKLSAGDVLPSCGHWWNTPSGLELAVATICKERS

SEQ ID NO: 37704 - protein, 126 aa, Homo sapiens
  REGION 1..126: note = ENSP00000435800
MAAKQPPPLMKKHSQTDLVSRLKTRKILGVGGEDDDGEVHRSKISQVLGNEIKFTIREPLGLRVWQFVSAVLFSGIAIMVSPHPQPLRSGPVWLPQPFSGSPEVPPPSWPLVQGPICQALGLPPRT

SEQ ID NO: 37705 - protein, 98 aa, Homo sapiens
  REGION 1..98: note = ENSP00000434461
MAAKQPPPLMKKHSQTDLVSRLKTRKILGVGGEDDDGEVHRSKISQVLGNEIKFTIREPLGLRVWQFVSAVLFSGIAIMALAFPDQLYDAVFDGAQVT

SEQ ID NO: 37706 - protein, 123 aa, Homo sapiens
  REGION 1..123: note = ENSP00000435739
MPPSCHLLCPDLSPSSAHPSAEAGLEEKMAAKQPPPLMKKHSQTDLVSRLKTRKILGVGGEDDDGEVHRSKISQVLGNEIKFTIREPLGLRVWQFVSAVLFSGIAIMALAFPDQLYDAVFDGA

SEQ ID NO: 37707 - protein, 93 aa, Homo sapiens
  REGION 1..93: note = ENSP00000437284
MAAKQPPPLMKKHSQTDLVSRLKTRKILGVGGEDDDGEVHRSKISQVLGNEIKFTIREPLGLRVWQFVSAVLFSGIAIMALAFPDQLYDAVFD

SEQ ID NO: 37708 - protein, 79 aa, Homo sapiens
  REGION 1..79: note = ENSP00000432089
MAAKQPPPLMKKHSQTDLVSRLKTRKILGVGGEDDDGEVHRSKISQVLGNEIKFTIREPLGLRVWQFVSAVLFSGIAIM

SEQ ID NO: 37709 - protein, 73 aa, Homo sapiens
  REGION 1..73: note = ENSP00000431556
MAAKQPPPLMKKHSQTDLVSRLKTRKILGVGGEDDDGEVHRSKISQVLGNEIKFTIREPLGLRVWQFVSAVLF

SEQ ID NO: 37710 - protein, 62 aa, Homo sapiens
  REGION 1..62: note = ENSP00000432926
MAAKQPPPLMKKHSQTDLVSRLKTRKILGVGGEDDDGEVHRSKISQVLGNEIKFTIREPLGL

SEQ ID NO: 37711 - protein, 189 aa, Homo sapiens; identical to SEQ ID NO: 37697
  REGION 1..189: note = ENSP00000481456

SEQ ID NO: 37712 - protein, 189 aa, Homo sapiens; identical to SEQ ID NO: 37697
  REGION 1..189: note = ENSP00000309532

SEQ ID NO: 37713 - protein, 64 aa, Homo sapiens; identical to SEQ ID NO: 37700
  REGION 1..64: note = ENSP00000486799

SEQ ID NO: 37714 - protein, 848 aa, Homo sapiens
  REGION 1..848: note = ENSP00000264811
MEGSPSLRRMTVMREKGRRQAVRGPAFMFNDRGTSLTAEEERFLDAAEYGNIPVVRKMLEESKTLNVNCVDYMGQNALQLAVGNEHLEVTELLLKKENLARIGDALLLAISKGYVRIVEAILNHPGFAASKRLTLSPCEQELQDDDFYAYDEDGTRFSPDITPIILAAHCQKYEVVHMLLMKGARIERPHDYFCKCGDCMEKQRHDSFSHSRSRINAYKGLASPAYLSLSSEDPVLTALELSNELAKLANIEKEFKNDYRKLSMQCKDFVVGVLDLCRDSEEVEAILNGDLESAEPLEVHRHKASLSRVKLAIKYEVKKFVAHPNCQQQLLTIWYENLSGLREQTIAIKCLVVLVVALGLPFLAIGYWIAPCSRLGKILRSPFMKFVAHAASFIIFLGLLVFNASDRFEGITTLPNITVTDYPKQIFRVKTTQFTWTEMLIMVWVLGMMWSECKELWLEGPREYILQLWNVLDFGMLSIFIAAFTARFLAFLQATKAQQYVDSYVQESDLSEVTLPPEIQYFTYARDKWLPSDPQIISEGLYAIAVVLSFSRIAYILPANESFGPLQISLGRTVKDIFKFMVLFIMVFFAFMIGMFILYSYYLGAKVNAAFTTVEESFKTLFWSIFGLSEVTSVVLKYDHKFIENIGYVLYGIYNVTMVVVLLNMLIAMINSSYQEIEDDSDVEWKFARSKLWLSYFDDGKTLPPPFSLVPSPKSFVYFIMRIVNFPKCRRRRLQKDIEMGMGNSKSRLNLFTQSNSRVFESHSFNSILNQPTRYQQIMKRLIKRYVLKAQVDKENDEVNEGELKEIKQDISSLRYELLEDKSQATEELAILIHKLSEKLNPSMLRCE

SEQ ID NO: 37715 - protein, 921 aa, Homo sapiens
  REGION 1..921: note = ENSP00000368966
MSTKVRKCKEQARVTFPAPEEEEDEGEDEGAEPQRRRRGWRGVNGGLEPRSAPSQREPHGYCPPPFSHGPDLSMEGSPSLRRMTVMREKGRRQAVRGPAFMFNDRGTSLTAEEERFLDAAEYGNIPVVRKMLEESKTLNVNCVDYMGQNALQLAVGNEHLEVTELLLKKENLARIGDALLLAISKGYVRIVEAILNHPGFAASKRLTLSPCEQELQDDDFYAYDEDGTRFSPDITPIILAAHCQKYEVVHMLLMKGARIERPHDYFCKCGDCMEKQRHDSFSHSRSRINAYKGLASPAYLSLSSEDPVLTALELSNELAKLANIEKEFKNDYRKLSMQCKDFVVGVLDLCRDSEEVEAILNGDLESAEPLEVHRHKASLSRVKLAIKYEVKKFVAHPNCQQQLLTIWYENLSGLREQTIAIKCLVVLVVALGLPFLAIGYWIAPCSRLGKILRSPFMKFVAHAASFIIFLGLLVFNASDRFEGITTLPNITVTDYPKQIFRVKTTQFTWTEMLIMVWVLGMMWSECKELWLEGPREYILQLWNVLDFGMLSIFIAAFTARFLAFLQATKAQQYVDSYVQESDLSEVTLPPEIQYFTYARDKWLPSDPQIISEGLYAIAVVLSFSRIAYILPANESFGPLQISLGRTVKDIFKFMVLFIMVFFAFMIGMFILYSYYLGAKVNAAFTTVEESFKTLFWSIFGLSEVTSVVLKYDHKFIENIGYVLYGIYNVTMVVVLLNMLIAMINSSYQEIEDDSDVEWKFARSKLWLSYFDDGKTLPPPFSLVPSPKSFVYFIMRIVNFPKCRRRRLQKDIEMGMGNSKSRLNLFTQSNSRVFESHSFNSILNQPTRYQQIMKRLIKRYVLKAQVDKENDEVNEGELKEIKQDISSLRYELLEDKSQATEELAILIHKLSEKLNPSMLRCE

SEQ ID NO: 37716 - protein, 276 aa, Homo sapiens
  REGION 1..276: note = ENSP00000423866
MEGSPSLRRMTVMREKGRRQAVRGPAFMFNDRGTSLTAEEERFLDAAEYGNIPVVRKMLEESKTLNVNCVDYMGQNALQLAVGNEHLEVTELLLKKENLARIGDALLLAISKGYVRIVEAILNHPGFAASKRLTLSPCEQELQDDDFYAYDEDGTRFSPDITPIILAAHCQKYEVVHMLLMKGARIERPHDYFCKCGDCMEKQRHDSFSHSRSRINAYKGLASPAYLSLSSEDPVLTALELSNELAKLANIEKEFKISEQVENSKFRLETVEKHLE

SEQ ID NO: 37717 - protein, 793 aa, Homo sapiens
  REGION 1..793: note = ENSP00000426899
MEGSPSLRRMTVMREKGRRQAVRGPAFMFNDRGTSLTAEEERFLDAAEYGNIPVVRKMLEESKTLNVNCVDYMGQNALQLAVGNEHLEVTELLLKKENLARIGDALLLAISKGYVRIVEAILNHPGFAASKRLTLSPCEQELQDDDFYAYDEDGTRFSPDITPIILAAHCQKYEVVHMLLMKGARIERPHDYFCKCGDCMEKQRHDSFSHSRSRINAYKGLASPAYLSLSSEDPVLTALELSNELAKLANIEKEFKNDYRKLSMQCKDFVVGVLDLCRDSEEVEAILNGDLESAEPLEVHRHKASLSRVKLAIKYEVKKLGKILRSPFMKFVAHAASFIIFLGLLVFNASDRFEGITTLPNITVTDYPKQIFRVKTTQFTWTEMLIMVWVLGMMWSECKELWLEGPREYILQLWNVLDFGMLSIFIAAFTARFLAFLQATKAQQYVDSYVQESDLSEVTLPPEIQYFTYARDKWLPSDPQIISEGLYAIAVVLSFSRIAYILPANESFGPLQISLGRTVKDIFKFMVLFIMVFFAFMIGMFILYSYYLGAKVNAAFTTVEESFKTLFWSIFGLSEVTSVVLKYDHKFIENIGYVLYGIYNVTMVVVLLNMLIAMINSSYQEIEDDSDVEWKFARSKLWLSYFDDGKTLPPPFSLVPSPKSFVYFIMRIVNFPKCRRRRLQKDIEMGMGNSKSRLNLFTQSNSRVFESHSFNSILNQPTRYQQIMKRLIKRYVLKAQVDKENDEVNEGELKEIKQDISSLRYELLEDKSQATEELAILIHKLSEKLNPSMLRCE

SEQ ID NO: 37718 - protein, 93 aa, Homo sapiens
  REGION 1..93: note = ENSP00000422214
MEGSPSLRRMTVMREKGRRQAVRGPAFMFNDRGTSLTAEEERFLDAAEYGNIPVVRKMLEESKTLNVNCVDYMGQNALQLAVGNEHLEVTELL

SEQ ID NO: 37719 - protein, 973 aa, Homo sapiens
  REGION 1..973: note = ENSP00000262839
MAQLYYKKVNYSPYRDRIPLQIVRAETELSAEEKAFLNAVEKGDYATVKQALQEAEIYYNVNINCMDPLGRSALLIAIENENLEIMELLLNHSVYVGDALLYAIRKEVVGAVELLLSYRRPSGEKQVPTLMMDTQFSEFTPDITPIMLAAHTNNYEIIKLLVQKRVTIPRPHQIRCNCVECVSSSEVDSLRHSRSRLNIYKALASPSLIALSSEDPILTAFRLGWELKELSKVENEFKAEYEELSQQCKLFAKDLLDQARSSRELEIILNHRDDHSEELDPQKYHDLAKLKVAIKYHQKEFVAQPNCQQLLATLWYDGFPGWRRKHWVVKLLTCMTIGFLFPMLSIAYLISPRSNLGLFIKKPFIKFICHTASYLTFLFMLLLASQHIVRTDLHVQGPPPTVVEWMILPWVLGFIWGEIKEMWDGGFTEYIHDWWNLMDFAMNSLYLATISLKIVAYVKYNGSRPREEWEMWHPTLIAEALFAISNILSSLRLISLFTANSHLGPLQISLGRMLLDILKFLFIYCLVLLAFANGLNQLYFYYETRAIDEPNNCKGIRCEKQNNAFSTLFETLQSLFWSVFGLLNLYVTNVKARHEFTEFVGATMFGTYNVISLVVLLNMLIAMMNNSYQLIADHADIEWKFARTKLWMSYFDEGGTLPPPFNIIPSPKSFLYLGNWFNNTFCPKRDPDGRRRRRNLRSFTERNADSLIQNQHYQEVIRNLVKRYVAAMIRNSKTHEGLTEENFKELKQDISSFRYEVLDLLGNRKHPRSFSTSSTELSQRDDNNDGSGGARAKSKSVSFNLGCKKKTCHGPPLIRTMPRSSGAQGKSKAESSSKRSFMGPSLKKLGLLFSKFNGHMSEPSSEPMYTISDGIVQQHCMWQDIRYSQMEKGKAEACSQSEINLSEVELGEVQGAAQSSECPLACSSSLHCASSICSSNSKLLDSSEDVFETWGEACDLLMHKWGDGQEEQVTTRL

SEQ ID NO: 37720 - protein, 931 aa, Homo sapiens
  REGION 1..931: note = ENSP00000340913
MSQSPAFGPRRGSSPRGAAGAAARRNESQDYLLMDSELGEDGCPQAPLPCYGYYPCFRGSDNRLAHRRQTVLREKGRRLANRGPAYMFSDRSTSLSIEEERFLDAAEYGNIPVVRKMLEECHSLNVNCVDYMGQNALQLAVANEHLEITELLLKKENLSRVGDALLLAISKGYVRIVEAILSHPAFAEGKRLATSPSQSELQQDDFYAYDEDGTRFSHDVTPIILAAHCQEYEIVHTLLRKGARIERPHDYFCKCNDCNQKQKHDSFSHSRSRINAYKGLASPAYLSLSSEDPVMTALELSNELAVLANIEKEFKNDYKKLSMQCKDFVVGLLDLCRNTEEVEAILNGDVETLQSGDHGRPNLSRLKLAIKYEVKKFVAHPNCQQQLLSIWYENLSGLRQQTMAVKFLVVLAVAIGLPFLALIYWFAPCSKMGKIMRGPFMKFVAHAASFTIFLGLLVMNAADRFEGTKLLPNETSTDNAKQLFRMKTSCFSWMEMLIISWVIGMIWAECKEIWTQGPKEYLFELWNMLDFGMLAIFAASFIARFMAFWHASKAQSIIDANDTLKDLTKVTLGDNVKYYNLARIKWDPSDPQIISEGLYAIAVVLSFSRIAYILPANESFGPLQISLGRTVKDIFKFMVIFIMVFVAFMIGMFNLYSYYIGAKQNEAFTTVEESFKTLFWAIFGLSEVKSVVINYNHKFIENIGYVLYGVYNVTMVIVLLNMLIAMINSSFQEIEDDADVEWKFARAKLWFSYFEEGRTLPVPFNLVPSPKSLFYLLLKLKKWISELFQGHKKGFQEDAEMNKINEEKKLGILGSHEDLSKLSLDKKQVGHNKQPSIRSSEDFHLNSFNNPPRQYQKIMKRLIKRYVLQAQIDKESDEVNEGELKEIKQDISSLRYELLEEKSQNTEDLAELIRELGEKLSMEPNQEETNR

SEQ ID NO: 37721 - protein, 853 aa, Homo sapiens
  REGION 1..853: note = ENSP00000435574
MSQSPAFGPRRGSSPRGAAGAAARRNESQDYLLMDSELGEDGCPQAPLPCYGYYPCFRGSDNRLAHRRQTVLREKGRRLANRGPAYMFSDRSTSLSIEEERFLDAAEYGNIPVVRKMLEECHSLNVNCVDYMGQNALQLAVANEHLEITELLLKKENLSRVGDALLLAISKGYVRIVEAILSHPAFAEGKRLATSPSQSELQQDDFYAYDEDGTRFSHDVTPIILAAHCQEYEIVHTLLRKGARIERPHDYFCKCNDCNQKQKHDSFSHSRSRINAYKGLASPAYLSLSSEDPVMTALELSNELAVLANIEKEFKNDYKKLSMQCKDFVVGLLDLCRNTEEVEAILNGDVETLQSGDHGRPNLSRLKLAIKYEVKKFVAHPNCQQQLLSIWYENLSGLRQQTMAVKFLVVLAVAIGLPFLALIYWFAPCSKMGKIMRGPFMKFVAHAASFTIFLGLLVMNAADRFEGTKLLPNETSTDNAKQLFRMKTSCFSWMEMLIISWVIARIKWDPSDPQIISEGLYAIAVVLSFSRIAYILPANESFGPLQISLGRTVKDIFKFMVIFIMVFVAFMIGMFNLYSYYIGAKQNEAFTTVEESFKTLFWAIFGLSEVKSVVINYNHKFIENIGYVLYGVYNVTMVIVLLNMLIAMINSSFQEIEDDADVEWKFARAKLWFSYFEEGRTLPVPFNLVPSPKSLFYLLLKLKKWISELFQGHKKGFQEDAEMNKINEEKKLGILGSHEDLSKLSLDKKQVGHNKQPSIRSSEDFHLNSFNNPPRQYQKIMKRLIKRYVLQAQIDKESDEVNEGELKEIKQDISSLRYELLEEKSQNTEDLAELIRELGEKLSMEPNQEETNR

SEQ ID NO: 37722 - protein, 815 aa, Homo sapiens
  REGION 1..815: note = ENSP00000343672
MSQSPAFGPRRGSSPRGAAGAAARRNESQDYLLMDSELGEDGCPQAPLPCYGYYPCFRGSDNRLAHRRQTVLREKGRRLANRGPAYMFSDRSTSLSIEEERFLDAAEYGNIPVVRKMLEECHSLNVNCVDYMGQNALQLAVANEHLEITELLLKKENLSRVGDALLLAISKGYVRIVEAILSHPAFAEGKRLATSPSQSELQQDDFYAYDEDGTRFSHDVTPIILAAHCQEYEIVHTLLRKGARIERPHDYFCKCNDCNQKQKHDSFSHSRSRINAYKGLASPAYLSLSSEDPVMTALELSNELAVLANIEKEFKMGKIMRGPFMKFVAHAASFTIFLGLLVMNAADRFEGTKLLPNETSTDNAKQLFRMKTSCFSWMEMLIISWVIGMIWAECKEIWTQGPKEYLFELWNMLDFGMLAIFAASFIARFMAFWHASKAQSIIDANDTLKDLTKVTLGDNVKYYNLARIKWDPSDPQIISEGLYAIAVVLSFSRIAYILPANESFGPLQISLGRTVKDIFKFMVIFIMVFVAFMIGMFNLYSYYIGAKQNEAFTTVEESFKTLFWAIFGLSEVKSVVINYNHKFIENIGYVLYGVYNVTMVIVLLNMLIAMINSSFQEIEDDADVEWKFARAKLWFSYFEEGRTLPVPFNLVPSPKSLFYLLLKLKKWISELFQGHKKGFQEDAEMNKINEEKKLGILGSHEDLSKLSLDKKQVGHNKQPSIRSSEDFHLNSFNNPPRQYQKIMKRLIKRYVLQAQIDKESDEVNEGELKEIKQDISSLRYELLEEKSQNTEDLAELIRELGEKLSMEPNQEETNR

SEQ ID NO: 37723 - protein, 876 aa, Homo sapiens
  REGION 1..876: note = ENSP00000353687
MSQSPAFGPRRGSSPRGAAGAAARRNESQDYLLMDSELGEDGCPQAPLPCYGYYPCFRGSDNRLAHRRQTVLREKGRRLANRGPAYMFSDRSTSLSIEEERFLDAAEYGNIPVVRKMLEECHSLNVNCVDYMGQNALQLAVANEHLEITELLLKKENLSRVGDALLLAISKGYVRIVEAILSHPAFAEGKRLATSPSQSELQQDDFYAYDEDGTRFSHDVTPIILAAHCQEYEIVHTLLRKGARIERPHDYFCKCNDCNQKQKHDSFSHSRSRINAYKGLASPAYLSLSSEDPVMTALELSNELAVLANIEKEFKNDYKKLSMQCKDFVVGLLDLCRNTEEVEAILNGDVETLQSGDHGRPNLSRLKLAIKYEVKKMGKIMRGPFMKFVAHAASFTIFLGLLVMNAADRFEGTKLLPNETSTDNAKQLFRMKTSCFSWMEMLIISWVIGMIWAECKEIWTQGPKEYLFELWNMLDFGMLAIFAASFIARFMAFWHASKAQSIIDANDTLKDLTKVTLGDNVKYYNLARIKWDPSDPQIISEGLYAIAVVLSFSRIAYILPANESFGPLQISLGRTVKDIFKFMVIFIMVFVAFMIGMFNLYSYYIGAKQNEAFTTVEESFKTLFWAIFGLSEVKSVVINYNHKFIENIGYVLYGVYNVTMVIVLLNMLIAMINSSFQEIEDDADVEWKFARAKLWFSYFEEGRTLPVPFNLVPSPKSLFYLLLKLKKWISELFQGHKKGFQEDAEMNKINEEKKLGILGSHEDLSKLSLDKKQVGHNKQPSIRSSEDFHLNSFNNPPRQYQKIMKRLIKRYVLQAQIDKESDEVNEGELKEIKQDISSLRYELLEEKSQNTEDLAELIRELGEKLSMEPNQEETNR

SEQ ID NO: 37724 - protein, 807 aa, Homo sapiens
  REGION 1..807: note = ENSP00000424854
MLRNSTFKNMQRRHTTLREKGRRQAIRGPAYMFNEKGTSLTPEEERFLDSAEYGNIPVVRKMLEESKTLNFNCVDYMGQNALQLAVGNEHLEVTELLLKKENLARVGDALLLAISKGYVRIVEAILNHPAFAQGQRLTLSPLEQELRDDDFYAYDEDGTRFSHDITPIILAAHCQEYEIVHILLLKGARIERPHDYFCKCNECTEKQRKDSFSHSRSRMNAYKGLASAAYLSLSSEDPVLTALELSNELARLANIETEFKNDYRKLSMQCKDFVVGVLDLCRDTEEVEAILNGDVNFQVWSDHHRPSLSRIKLAIKYEVKKLGRTLRSPFMKFVAHAVSFTIFLGLLVVNASDRFEGVKTLPNETFTDYPKQIFRVKTTQFSWTEMLIMKWVLGMIWSECKEIWEEGPREYVLHLWNLLDFGMLSIFVASFTARFMAFLKATEAQLYVDQHVQDDTLHNVSLPPEVAYFTYARDKWWPSDPQIISEGLYAIAVVLSFSRIAYILPANESFGPLQISLGRTVKDIFKFMVIFIMVFVAFMIGMFNLYSYYRGAKYNPAFTTVEESFKTLFWSIFGLSEVISVVLKYDHKFIENIGYVLYGVYNVTMVVVLLNMLIAMINNSYQEIEEDADVEWKFARAKLWLSYFDEGRTLPAPFNLVPSPKSFYYLIMRIKMCLIKLCKSKAKSCENDLEMGMLNSKFKKTRYQAGMRNSENLTANNTLSKPTRYQKIMKRLIKRYVLKAQVDRENDEVNEGELKEIKQDISSLRYELLEEKSQATGELADLIQQLSEKFGKNLNKDHLRVNKGKDI

SEQ ID NO: 37725 - protein, 801 aa, Homo sapiens
  REGION 1..801: note = ENSP00000367720
MLRNSTFKNMQRRHTTLREKGRRQAIRGPAYMFNEKGTSLTPEEERFLDSAEYGNIPVVRKMLEESKTLNFNCVDYMGQNALQLAVGNEHLEVTELLLKKENLARVGDALLLAISKGYVRIVEAILNHPAFAQGQRLTLSPLEQELRDDDFYAYDEDGTRFSHDITPIILAAHCQEYEIVHILLLKGARIERPHDYFCKCNECTEKQRKDSFSHSRSRMNAYKGLASAAYLSLSSEDPVLTALELSNELARLANIETEFKFVAHPNCQQQLLTMWYENLSGLRQQSIAVKFLAVFGVSIGLPFLAIAYWIAPCSKLGRTLRSPFMKFVAHAVSFTIFLGLLVVNASDRFEGVKTLPNETFTDYPKQIFRVKTTQFSWTEMLIMKWVLGMIWSECKEIWEEGPREYVLHLWNLLDFGMLSIFVASFTARFMAFLKATEAQLYVDQHVQDDTLHNVSLPPEVAYFTYARDKWWPSDPQIISEGLYAIAVVLSFSRIAYILPANESFGPLQISLGRTVKDIFKFMVIFIMVFVAFMIGMFNLYSYYRGAKYNPAFTTVEESFKTLFWSIFGLSEVISVVLKYDHKFIENIGYVLYGVYNVTMVVVLLNMLIAMINNSYQEIEEDADVEWKFARAKLWLSYFDEGRTLPAPFNLVPSPKSFYYLIMRIKMCLIKLCKSKAKSCENDLEMGMLNSKFKKTRYQAGMRNSENLTANNTLSKPTRYQKIMKRLIKRYVLKAQVDRENDEVNEGELKEIKQDISSLRYELLEEKSQATGELADLIQQLSEKFGKNLNKDHLRVNKGKDI

SEQ ID NO: 37726 - protein, 746 aa, Homo sapiens
  REGION 1..746: note = ENSP00000330322
MLRNSTFKNMQRRHTTLREKGRRQAIRGPAYMFNEKGTSLTPEEERFLDSAEYGNIPVVRKMLEESKTLNFNCVDYMGQNALQLAVGNEHLEVTELLLKKENLARVGDALLLAISKGYVRIVEAILNHPAFAQGQRLTLSPLEQELRDDDFYAYDEDGTRFSHDITPIILAAHCQEYEIVHILLLKGARIERPHDYFCKCNECTEKQRKDSFSHSRSRMNAYKGLASAAYLSLSSEDPVLTALELSNELARLANIETEFKLGRTLRSPFMKFVAHAVSFTIFLGLLVVNASDRFEGVKTLPNETFTDYPKQIFRVKTTQFSWTEMLIMKWVLGMIWSECKEIWEEGPREYVLHLWNLLDFGMLSIFVASFTARFMAFLKATEAQLYVDQHVQDDTLHNVSLPPEVAYFTYARDKWWPSDPQIISEGLYAIAVVLSFSRIAYILPANESFGPLQISLGRTVKDIFKFMVIFIMVFVAFMIGMFNLYSYYRGAKYNPAFTTVEESFKTLFWSIFGLSEVISVVLKYDHKFIENIGYVLYGVYNVTMVVVLLNMLIAMINNSYQEIEEDADVEWKFARAKLWLSYFDEGRTLPAPFNLVPSPKSFYYLIMRIKMCLIKLCKSKAKSCENDLEMGMLNSKFKKTRYQAGMRNSENLTANNTLSKPTRYQKIMKRLIKRYVLKAQVDRENDEVNEGELKEIKQDISSLRYELLEEKSQATGELADLIQQLSEKFGKNLNKDHLRVNKGKDI

SEQ ID NO: 37727 - protein, 261 aa, Homo sapiens
  REGION 1..261: note = ENSP00000426870
MLRNSTFKNMQRRHTTLREKGRRQAIRGPAYMFNEKGTSLTPEEERFLDSAEYGNIPVVRKMLEESKTLNFNCVDYMGQNALQLAVGNEHLEVTELLLKKENLARVGDALLLAISKGYVRIVEAILNHPAFAQGQRLTLSPLEQELRDDDFYAYDEDGTRFSHDITPIILAAHCQEYEIVHILLLKGARIERPHDYFCKCNECTEKQRKDSFSHSRSRMNAYKGLASAAYLSLSSEDPVLTALELSNELARLANIETEFKE

SEQ ID NO: 37728 - protein, 862 aa, Homo sapiens
  REGION 1..862: note = ENSP00000426070
MLRNSTFKNMQRRHTTLREKGRRQAIRGPAYMFNEKGTSLTPEEERFLDSAEYGNIPVVRKMLEESKTLNFNCVDYMGQNALQLAVGNEHLEVTELLLKKENLARVGDALLLAISKGYVRIVEAILNHPAFAQGQRLTLSPLEQELRDDDFYAYDEDGTRFSHDITPIILAAHCQEYEIVHILLLKGARIERPHDYFCKCNECTEKQRKDSFSHSRSRMNAYKGLASAAYLSLSSEDPVLTALELSNELARLANIETEFKNDYRKLSMQCKDFVVGVLDLCRDTEEVEAILNGDVNFQVWSDHHRPSLSRIKLAIKYEVKKFVAHPNCQQQLLTMWYENLSGLRQQSIAVKFLAVFGVSIGLPFLAIAYWIAPCSKLGRTLRSPFMKFVAHAVSFTIFLGLLVVNASDRFEGVKTLPNETFTDYPKQIFRVKTTQFSWTEMLIMKWVLGMIWSECKEIWEEGPREYVLHLWNLLDFGMLSIFVASFTARFMAFLKATEAQLYVDQHVQDDTLHNVSLPPEVAYFTYARDKWWPSDPQIISEGLYAIAVVLSFSRIAYILPANESFGPLQISLGRTVKDIFKFMVIFIMVFVAFMIGMFNLYSYYRGAKYNPAFTTVEESFKTLFWSIFGLSEVISVVLKYDHKFIENIGYVLYGVYNVTMVVVLLNMLIAMINNSYQEIEEDADVEWKFARAKLWLSYFDEGRTLPAPFNLVPSPKSFYYLIMRIKMCLIKLCKSKAKSCENDLEMGMLNSKFKKTRYQAGMRNSENLTANNTLSKPTRYQKIMKRLIKRYVLKAQVDRENDEVNEGELKEIKQDISSLRYELLEEKSQATGELADLIQQLSEKFGKNLNKDHLRVNKGKDI

SEQ ID NO: 37729 - protein, 380 aa, Homo sapiens
  REGION 1..380: note = ENSP00000421571
MLRNSTFKNMQRRHTTLREKGRRQAIRGPAYMFNEKGTSLTPEEERFLDSAEYGNIPVVRKMLEESKTLNFNCVDYMGQNALQLAVGNEHLEVTELLLKKENLARVGDALLLAISKGYVRIVEAILNHPAFAQGQRLTLSPLEQELRDDDFYAYDEDGTRFSHDITPIILAAHCQEYEIVHILLLKGARIERPHDYFCKCNECTEKQRKDSFSHSRSRMNAYKGLASAAYLSLSSEDPVLTALELSNELARLANIETEFKNDYRKLSMQCKDFVVGVLDLCRDTEEVEAILNGDVNFQVWSDHHRPSLSRIKLAIKYEVKKFVAHPNCQQQLLTMWYENLSGLRQQSIAVKFLAVFGVSIGLPFLAIAYWIAPCSKVQTA

SEQ ID NO: 37730 - protein, 1503 aa, Homo sapiens
  REGION 1..1503: note = ENSP00000300482
MEPSALRKAGSEQEEGFEGLPRRVTDLGMVSNLRRSNSSLFKSWRLQCPFGNNDKQESLSSWIPENIKKKECVYFVESSKLSDAGKVVCQCGYTHEQHLEEATKPHTFQGTQWDPKKHVQEMPTDAFGDIVFTGLSQKVKKYVRVSQDTPSSVIYHLMTQHWGLDVPNLLISVTGGAKNFNMKPRLKSIFRRGLVKVAQTTGAWIITGGSHTGVMKQVGEAVRDFSLSSSYKEGELITIGVATWGTVHRREGLIHPTGSFPAEYILDEDGQGNLTCLDSNHSHFILVDDGTHGQYGVEIPLRTRLEKFISEQTKERGGVAIKIPIVCVVLEGGPGTLHTIDNATTNGTPCVVVEGSGRVADVIAQVANLPVSDITISLIQQKLSVFFQEMFETFTESRIVEWTKKIQDIVRRRQLLTVFREGKDGQQDVDVAILQALLKASRSQDHFGHENWDHQLKLAVAWNRVDIARSEIFMDEWQWKPSDLHPTMTAALISNKPEFVKLFLENGVQLKEFVTWDTLLYLYENLDPSCLFHSKLQKVLVEDPERPACAPAAPRLQMHHVAQVLRELLGDFTQPLYPRPRHNDRLRLLLPVPHVKLNVQGVSLRSLYKRSSGHVTFTMDPIRDLLIWAIVQNRRELAGIIWAQSQDCIAAALACSKILKELSKEEEDTDSSEEMLALAEEYEHRAIGVFTECYRKDEERAQKLLTRVSEAWGKTTCLQLALEAKDMKFVSHGGIQAFLTKVWWGQLSVDNGLWRVTLCMLAFPLLLTGLISFREKRLQDVGTPAARARAFFTAPVVVFHLNILSYFAFLCLFAYVLMVDFQPVPSWCECAIYLWLFSLVCEEMRQLFYDPDECGLMKKAALYFSDFWNKLDVGAILLFVAGLTCRLIPATLYPGRVILSLDFILFCLRLMHIFTISKTLGPKIIIVKRMMKDVFFFLFLLAVWVVSFGVAKQAILIHNERRVDWLFRGAVYHSYLTIFGQIPGYIDGVNFNPEHCSPNGTDPYKPKCPESDATQQRPAFPEWLTVLLLCLYLLFTNILLLNLLIAMFNYTFQQVQEHTDQIWKFQRHDLIEEYHGRPAAPPPFILLSHLQLFIKRVVLKTPAKRHKQLKNKLEKNEEAALLSWEIYLKENYLQNRQFQQKQRPEQKIEDISNKVDAMVDLLDLDPLKRSGSMEQRLASLEEQVAQTAQALHWIVRTLRASGFSSEADVPTLASQKAAEEPDAEPGGRKKTEEPGDSYHVNARHLLYPNCPVTRFPVPNEKVPWETEFLIYDPPFYTAERKDAAAMDPMGDTLEPLSTIQYNVVDGLRDRRSFHGPYTVQAGLPLNPMGRTGLRGRGSLSCFGPNHTLYPMVTRWRRNEDGAICRKSIKKMLEVLVVKLPLSEHWALPGGSREPGEMLPRKLKRILRQEHWPSFENLLKCGMEVYKGYMDDPRNTDNAWIETVAVSVHFQDQNDVELNRLNSNLHACDSGASIRWQVVDRRIPLYANHKTLLQKAAAEFGAHY

SEQ ID NO: 37731 - protein, 143 aa, Homo sapiens
  REGION 1..143: note = ENSP00000393982
MEPSALRKAGSEQEEGFEGLPRRVTDLGMVSNLRRSNSSLFKSWRLQCPFGNNDKQESLSSWIPENIKKKECVYFVESSKLSDAGKVVCQCGYTHEQHLEEATKPHTFQGTQWDPKKHVQEMPTDAFGDIVFTGLSQKVKKYV

SEQ ID NO: 37732 - protein, 1503 aa, Homo sapiens; identical to SEQ ID NO: 37730
  REGION 1..1503: note = ENSP00000381023

SEQ ID NO: 37733 - protein, 1553 aa, Homo sapiens
  REGION 1..1553: note = ENSP00000381026
MEPSALRKAGSEQEEGFEGLPRRVTDLGMVSNLRRSNSSLFKSWRLQCPFGNNDKQESLSSWIPENIKKKECVYFVESSKLSDAGKVVCQCGYTHEQHLEEATKPHTFQGTQWDPKKHVQEMPTDAFGDIVFTGLSQKVKKYVRVSQDTPSSVIYHLMTQHWGLDVPNLLISVTGGAKNFNMKPRLKSIFRRGLVKVAQTTGAWIITGGSHTGVMKQVGEAVRDFSLSSSYKEGELITIGVATWGTVHRREGLIHPTGSFPAEYILDEDGQGNLTCLDSNHSHFILVDDGTHGQYGVEIPLRTRLEKFISEQTKERGGVAIKIPIVCVVLEGGPGTLHTIDNATTNGTPCVVVEGSGRVADVIAQVANLPVSDITISLIQQKLSVFFQEMFETFTESRIVEWTKKIQDIVRRRQLLTVFREGKDGQQDVDVAILQALLKASRSQDHFGHENWDHQLKLAVAWNRVDIARSEIFMDEWQWKPSDLHPTMTAALISNKPEFVKLFLENGVQLKEFVTWDTLLYLYENLDPSCLFHSKLQKVLVEDPERPACAPAAPRLQMHHVAQVLRELLGDFTQPLYPRPRHNDRLRLLLPVPHVKLNVQGVSLRSLYKRSSGHVTFTMDPIRDLLIWAIVQNRRELAGIIWAQSQDCIAAALACSKILKELSKEEEDTDSSEEMLALAEEYEHRAIGVFTECYRKDEERAQKLLTRVSEAWGKTTCLQLALEAKDMKFVSHGGIQAFLTKVWWGQLSVDNGLWRVTLCMLAFPLLLTGLISFREKRLQDVGTPAARARAFFTAPVVVFHLNILSYFAFLCLFAYVLMVDFQPVPSWCECAIYLWLFSLVCEEMRQLFYDPDECGLMKKAALYFSDFWNKLDVGAILLFVAGLTCRLIPATLYPGRVILSLDFILFCLRLMHIFTISKTLGPKIIIVKRMMKDVFFFLFLLAVWVVSFGVAKQAILIHNERRVDWLFRGAVYHSYLTIFGQIPGYIDGVNFNPEHCSPNGTDPYKPKCPESDATQQRPAFPEWLTVLLLCLYLLFTNILLLNLLIAMFNYTFQQVQEHTDQIWKFQRHDLIEEYHGRPAAPPPFILLSHLQLFIKRVVLKTPAKRHKQLKNKLEKNEEAALLSWEIYLKENYLQNRQFQQKQRPEQKIEDISNKAGLELWGSRTSSVCKSRQFLHLTVVESRGSEKAPVTTLACLQGCLGKHGRVDAMVDLLDLDPLKRSGSMEQRLASLEEQVAQTAQALHWIVRTLRASGFSSEADVPTLASQKAAEEPDAEPGGRKKTEEPGDSYHVNARHLLYPNCPVTRFPVPNEKVPWETEFLIYDPPFYTAERKDAAAMDPMGDTLEPLSTIQYNVVDGLRDRRSFHGPYTVQAGLPLNPMGRTGLRGRGSLSCFGPNHTLYPMVTRWRRNEDGAICRKSIKKMLEVLVVKLPLSEHWALPGGSREPGEMLPRKLKRILRQEHWPSFENLLKCGMEVYKGYMDDPRNTDNAWIETVAVSVHFQDQNDVELNRLNSNLHACDSGASIRWQVVDRRIPLYANHKTLLQKAAAEFGAHY

SEQ ID NO: 37734 - protein, 1449 aa, Homo sapiens
  REGION 1..1449: note = ENSP00000300481
MEPSALRKAGSEQEEGFEGLPRRVTDLGMVSNLRRSNSSLFKSWRLQCPFGNNDKQESLSSWIPENIKKKECVYFVESSKLSDAGKVVCQCGYTHEQHLEEATKPHTFQGTQWDPKKHVQEMPTDAFGDIVFTGLSQKVKKYVRVSQDTPSSVIYHLMTQHWGLDVPNLLISVTGGAKNFNMKPRLKSIFRRGLVKVAQTTGAWIITGGSHTGVMKQVGEAVRDFSLSSSYKEGELITIGVATWGTVHRREGLIHPTGSFPAEYILDEDGQGNLTCLDSNHSHFILVDDGTHGQYGVEIPLRTRLEKFISEQTKERGGVAIKIPIVCVVLEGGPGTLHTIDNATTNGTPCVVVEGSGRVADVIAQVANLPVSDITISLIQQKLSVFFQEMFETFTESRIVEWTKKIQDIVRRRQLLTVFREGKDGQQDVDVAILQALLKASRSQDHFGHENWDHQLKLAVAWNRVDIARSEIFMDEWQWKPSDLHPTMTAALISNKPEFVKLFLENGVQLKEFVTWDTLLYLYENLDPSCLFHSKLQMHHVAQVLRELLGDFTQPLYPRPRHNDRLRLLLPVPHVKLNVQGVSLRSLYKRSSGHVTFTMDPIRDLLIWAIVQNRRELAGIIWAQSQDCIAAALACSKILKELSKEEEDTDSSEEMLALAEEYEHRAIGVFTECYRKDEERAQKLLTRVSEAWGKTTCLQLALEAKDMKFVSHGGIQAFLTKVWWGQLSVDNGLWRVTLCMLAFPLLLTGLISFREKRLQDVGTPAARARAFFTAPVVVFHLNILSYFAFLCLFAYVLMVDFQPVPSWCECAIYLWLFSLVCEEMRQLFYDPDECGLMKKAALYFSDFWNKLDVGAILLFVAGLTCRLIPATLYPGRVILSLDFILFCLRLMHIFTISKTLGPKIIIVKRMMKDVFFFLFLLAVWVVSFGVAKQAILIHNERRVDWLFRGAVYHSYLTIFGQIPGYIDGVNFNPEHCSPNGTDPYKPKCPESDATQQRPAFPEWLTVLLLCLYLLFTNILLLNLLIAMFNYTFQQVQEHTDQIWKFQRHDLIEEYHGRPAAPPPFILLSHLQLFIKRVVLKTPAKRHKQLKNKLEKNEEAALLSWEIYLKENYLQNRQFQQKQRPEQKIEDISNKVDAMVDLLDLDPLKRSGSMEQRLASLEEQVAQTAQALHWIVRTLRASGFSSEADVPTLASQKAAEEPDAEPGGRKKTEEPGDSYHVNARHLLYPNCPVTRFPVPNEKVPWETEFLIYDPPFYTAERKDAAAMDPMGENPMGRTGLRGRGSLSCFGPNHTLYPMVTRWRRNEDGAICRKSIKKMLEVLVVKLPLSEHWALPGGSREPGEMLPRKLKRILRQEHWPSFENLLKCGMEVYKGYMDDPRNTDNAWIETVAVSVHFQDQNDVELNRLNSNLHACDSGASIRWQVVDRRIPLYANHKTLLQKAAAEFGAHY

SEQ ID NO: 37735 - protein, 247 aa, Homo sapiens [sequence omitted]

SEQ ID NO: 37736 - protein, 339 aa, Homo sapiens
  REGION 1..339: note = ENSP00000371338
  VARIANT 1: note = Any amino acid
XGDIAALLIAAGADVNAHAKGAFFNPKYQHEGFYFGETPLALAACTNQPEIVQLLMEHEQTDITSRDSRGNNILHALVTVAEDFKTQNDFVKRMYDMILLRSGNWELETTRNNDGLTPLQLAAKMGKAEILKYILSREIKEKRLRSLSRKFTDWAYGPVSSSLYDLTNVDTTTDNSVLEITVYNTNIDNRHEMLTLEPLHTLLHMKWKKFAKHMFFLSFCFYFFYNITLTLVSYYRPREEEAIPHPLALTHKMGWLQLLGRMFVLIWAMCISVKEGIAIFLLRPSDLQSILSDAWFHFVLVPRLPRAGHGPGLGEHALLYAGFPVHGHVQRHDPEGHFA

SEQ ID NO: 37737 - protein, 146 aa, Homo sapiens
  REGION 1..146: note = ENSP00000460856
  VARIANT 1: note = Any amino acid
XEMLTLEPLHTLLHMKWKKFAKHMFFLSFCFYFFYNITLTLVSYYRPREEEAIPHPLALTHKMGWLQLLGRMFVLIWAMCISVKEGIAIFLLRPSDLQSILSDAWFHFVFLGLADREVSQRQQGLQLLRQLQRRSAGTLQAHHRPG

SEQ ID NO: 37738 - protein, 791 aa, Homo sapiens
  REGION 1..791: note = ENSP00000301365
MKAHPKEMVPLMGKRVAAPSGNPAILPEKRPAEITPTKKSAHFFLEIEGFEPNPTVAKTSPPVFSKPMDSNIRQCISGNCDDMDSPQSPQDDVTETPSNPNSPSAQLAKEEQRRKKRRLKKRIFAAVSEGCVEELVELLVELQELCRRRHDEDVPDFLMHKLTASDTGKTCLMKALLNINPNTKEIVRILLAFAEENDILGRFINAEYTEEAYEGQTALNIAIERRQGDIAALLIAAGADVNAHAKGAFFNPKYQHEGFYFGETPLALAACTNQPEIVQLLMEHEQTDITSRDSRGNNILHALVTVAEDFKTQNDFVKRMYDMILLRSGNWELETTRNNDGLTPLQLAAKMGKAEILKYILSREIKEKRLRSLSRKFTDWAYGPVSSSLYDLTNVDTTTDNSVLEITVYNTNIDNRHEMLTLEPLHTLLHMKWKKFAKHMFFLSFCFYFFYNITLTLVSYYRPREEEAIPHPLALTHKMGWLQLLGRMFVLIWAMCISVKEGIAIFLLRPSDLQSILSDAWFHFVFFIQAVLVILSVFLYLFAYKEYLACLVLAMALGWANMLYYTRGFQSMGMYSVMIQKVILHDVLKFLFVYIVFLLGFGVALASLIEKCPKDNKDCSSYGSFSDAVLELFKLTIGLGDLNIQQNSKYPILFLFLLITYVILTFVLLLNMLIALMGETVENVSKESERIWRLQRARTILEFEKMLPEWLRSRFRMGELCKVAEDDFRLCLRINEVKWTEWKTHVSFLNEDPGPVRRTADFNKIQDSSRNNSKTTLNAFEEVEEFPETSV

SEQ ID NO: 37739 - protein, 55 aa, Homo sapiens
  REGION 1..55: note = ENSP00000458187
MKAHPKEMVPLMGKRVAAPSGNPAILPEKRPAEITPTKKSRHRVLPHWPQTPDLN

SEQ ID NO: 37740 - protein, 55 aa, Homo sapiens; identical to SEQ ID NO: 37739
  REGION 1..55: note = ENSP00000458239

SEQ ID NO: 37741 - protein, 790 aa, Homo sapiens
  REGION 1..790: note = ENSP00000461518
MKAHPKEMVPLMGKRVAAPSGNPAILPEKRPAEITPTKKSAHFFLEIEGFEPNPTVAKTSPPVFSKPMDSNIRQCISGNCDDMDSPQSPQDDVTETPSNPNSPSAQLAKEEQRRKKRRLKKRIFAAVSEGCVEELVELLVELQELCRRRHDEDVPDFLMHKLTASDTGKTCLMKALLNINPNTKEIVRILLAFAEENDILGRFINAEYTEEAYEGQTALNIAIERRQGDIAALLIAAGADVNAHAKGAFFNPKYQHEGFYFGETPLALAACTNQPEIVQLLMEHEQTDITSRDSRGNNILHALVTVAEDFKTQNDFVKRMYDMILLRSGNWELETTRNNDGLTPLQLAAKMGKAEILKYILSREIKEKRLRSLSRKFTDWAYGPVSSSLYDLTNVDTTTDNSVLEITVYNTNIDNRHEMLTLEPLHTLLHMKWKKFAKHMFFLSFCFYFFYNITLTLVSYYRPREEEAIPHPLALTHKMGWLQLLGRMFVLIWAMCISVKEGIAIFLLRPSDLQSILSDAWFHFVFFIQAVLVILSVFLYLFAYKEYLACLVLAMALGWANMLYYTRGFQSMGMYSVMIQKVILHDVLKFLFVYIVFLLGFGVALASLIEKCPKDNKDCSSYGSFSDAVLELFKLTIGLGDLNIQQNSKYPILFLFLLITYVILTFVLLLNMLIALMGETVENVSKESERIWRLQRARTILEFEKMLPEWLRSRFRMGELCKVAEDDFRLCLRINEVKWTEWKTHVSFLNEDPGPVRRTDFNKIQDSSRNNSKTTLNAFEEVEEFPETSV

SEQ ID NO: 37742 - protein, 765 aa, Homo sapiens
  REGION 1..765: note = ENSP00000460215
MKAHPKEMVPLMGKRVAAPSGNPAILPEKRPAEITPTKKSAHFFLEIEGFEPNPTVAKTSPPVFSKPMDSNIRQCISGNCDDMDSPQSPQDDVTETPSNPNSPSAQLAKEEQRRKKRRLKKRIFAAVSEGCVEELVELLVELQELCRRRHDEDVPDFLMHKLTASDTGKTCLMKALLNINPNTKEIVRILLAFAEENDILGRFINAEYTEEAYEGQTALNIAIERRQGDIAALLIAAGADVNAHAKGAFFNPKYQHEGFYFGETPLALAACTNQPEIVQLLMEHEQTDITSRDSRGNNILHALVTVAEDFKTQNDFVKRMYDMILLRSGNWELETTRNNDGLTPLQLAAKMGKAEILKYILSREIKEKRLRSLSRKFTDWAYGPVSSSLYDLTNVDTTTDNSVLEITVYNTNIDNRHEMLTLEPLHTLLHMKWKKFAKHMFFLSFCFYFFYNITLTLVSYYRPREEEAIPHPLALTHKMGWLQLLGRMFVLIWAMCISVKEGIAIFLLRPSDLQSILSDAWFHFVFFIQAVLVILSVFLYLFAYKEYLACLVLAMALGWANMLYYTRGFQSMGMYSVMIQKVILHDVLKFLFVYIVFLLGFGVALASLIEKCPKDNKDCSSYGSFSDAVLELFKLTIGLGDLNIQQNSKYPILFLFLLITYVILTFVLLLNMLIALMGETVENVSKESERIWRLQRARTILEFEKMLPEWLRSRFRMGELCKVAEDDFRLCLRINEVKWTEWKTHVSFLNEDPGPVRRTGTVAVR

SEQ ID NO: 37743 - protein, 775 aa, Homo sapiens
  REGION 1..775: note = ENSP00000483947
MSHHTWPSPALNLDFATYLLRDLGAHFFLEIEGFEPNPTVAKTSPPVFSKPMDSNIRQCISGNCDDMDSPQSPQDDVTETPSNPNSPSAQLAKEEQRRKKRRLKKRIFAAVSEGCVEELVELLVELQELCRRRHDEDVPDFLMHKLTASDTGKTCLMKALLNINPNTKEIVRILLAFAEENDILGRFINAEYTEEAYEGQTALNIAIERRQGDIAALLIAAGADVNAHAKGAFFNPKYQHEGFYFGETPLALAACTNQPEIVQLLMEHEQTDITSRDSRGNNILHALVTVAEDFKTQNDFVKRMYDMILLRSGNWELETTRNNDGLTPLQLAAKMGKAEILKYILSREIKEKRLRSLSRKFTDWAYGPVSSSLYDLTNVDTTTDNSVLEITVYNTNIDNRHEMLTLEPLHTLLHMKWKKFAKHMFFLSFCFYFFYNITLTLVSYYRPREEEAIPHPLALTHKMGWLQLLGRMFVLIWAMCISVKEGIAIFLLRPSDLQSILSDAWFHFVFFIQAVLVILSVFLYLFAYKEYLACLVLAMALGWANMLYYTRGFQSMGMYSVMIQKVILHDVLKFLFVYIVFLLGFGVALASLIEKCPKDNKDCSSYGSFSDAVLELFKLTIGLGDLNIQQNSKYPILFLFLLITYVILTFVLLLNMLIALMGETVENVSKESERIWRLQRARTILEFEKMLPEWLRSRFRMGELCKVAEDDFRLCLRINEVKWTEWKTHVSFLNEDPGPVRRTADFNKIQDSSRNNSKTTLNAFEEVEEFPETSV

SEQ ID NO: 37744 - protein, 765 aa, Homo sapiens
  REGION 1..765: note = ENSP00000352358
TGPLQGDGGPALGGADVAPRLSPVRVWPRPQAPKEPALHPMGLSLPKEKGLILCLWSKFCRWFQRRESWAQSRDEQNLLQQKRIWESPLLLAAKDNDVQALNKLLKYEDCKVHQRGAMGETALHIAALYDNLEAAMVLMEAAPELVFEPMTSELYEGQTALHIAVVNQNMNLVRALLARRASVSARATGTAFRRSPCNLIYFGEHPLSFAACVNSEEIVRLLIEHGADIRAQDSLGNTVLHILILQPNKTFACQMYNLLLSYDRHGDHLQPLDLVPNHQGLTPFKLAGVEGNTVMFQHLMQKRKHTQWTYGPLTSTLYDLTEIDSSGDEQSLLELIITTKKREARQILDQTPVKELVSLKWKRYGRPYFCMLGAIYLLYIICFTMCCIYRPLKPRTNNRTSPRDNTLLQQKLLQEAYMTPKDDIRLVGELVTVIGAIIILLVEVPDIFRMGVTRFFGQTILGGPFHVLIITYAFMVLVTMVMRLISASGEVVPMSFALVLGWCNVMYFARGFQMLGPFTIMIQKMIFGDLMRFCWLMAVVILGFASAFYIIFQTEDPEELGHFYDYPMALFSTFELFLTIIDGPANYNVDLPFMYSITYAAFAIIATLLMLNLLIAMMGDTHWRVAHERDELWRAQIVATTVMLERKLPRCLWPRSGICGREYGLGDRWFLRVEDRQDLNRQRIQRYAQAFHTRGSEDLDKDSVEKLELGCPFSPHLSLPMPSVSRSTSRSSANWERLRQGTLRRDLRGIINRGLEDGESWEYQI

SEQ ID NO: 37745 - protein, 122 aa, Homo sapiens
  REGION 1..122: note = ENSP00000411100
MTPKDDIRLVGELVTVIGAIIILLVEVPDIFRMGVTRFFGQTILGGPFHVLIITYAFMVLVTMVMRLISASGEVVPMSFALVLGWCNVMYFARGFQMLGPFTIMIQKMIFGDLMRFCWLMAV

SEQ ID NO: 37746 - protein, 56 aa, Homo sapiens
  REGION 1..56: note = ENSP00000415917
MPGAMGETALHIAALYDNLEAAMVLMEAAPELVFEPMTSELYEGQTALHIAVVNQN

SEQ ID NO: 37747 - protein, 765 aa, Homo sapiens
  REGION 1..765: note = ENSP00000492723
MGPLQGDGGPALGGADVAPRLSPVRVWPRPQAPKEPALHPMGLSLPKEKGLILCLWSKFCRWFQRRESWAQSRDEQNLLQQKRIWESPLLLAAKDNDVQALNKLLKYEDCKVHQRGAMGETALHIAALYDNLEAAMVLMEAAPELVFEPMTSELYEGQTALHIAVVNQNMNLVRALLARRASVSARATGTAFRRSPCNLIYFGEHPLSFAACVNSEEIVRLLIEHGADIRAQDSLGNTVLHILILQPNKTFACQMYNLLLSYDRHGDHLQPLDLVPNHQGLTPFKLAGVEGNTVMFQHLMQKRKHTQWTYGPLTSTLYDLTEIDSSGDEQSLLELIITTKKREARQILDQTPVKELVSLKWKRYGRPYFCMLGAIYLLYIICFTMCCIYRPLKPRTNNRTSPRDNTLLQQKLLQEAYMTPKDDIRLVGELVTVIGAIIILLVEVPDIFRMGVTRFFGQTILGGPFHVLIITYAFMVLVTMVMRLISASGEVVPMSFALVLGWCNVMYFARGFQMLGPFTIMIQKMIFGDLMRFCWLMAVVILGFASAFYIIFQTEDPEELGHFYDYPMALFSTFELFLTIIDGPANYNVDLPFMYSITYAAFAIIATLLMLNLLIAMMGDTHWRVAHERDELWRAQIVATTVMLERKLPRCLWPRSGICGREYGLGDRWFLRVEDRQDLNRQRIQRYAQAFHTRGSEDLDKDSVEKLELGCPFSPHLSLPMPSVSRSTSRSSANWERLRQGTLRRDLRGIINRGLEDGESWEYQI

SEQ ID NO: 37748 - protein, 725 aa, Homo sapiens
  REGION 1..725: note = ENSP00000479828
MGLSLPKEKGLILCLWSKFCRWFQRRESWAQSRDEQNLLQQKRIWESPLLLAAKDNDVQALNKLLKYEDCKVHQRGAMGETALHIAALYDNLEAAMVLMEAAPELVFEPMTSELYEGQTALHIAVVNQNMNLVRALLARRASVSARATGTAFRRSPRNLIYFGEHPLSFAACVNSEEIVRLLIEHGADIRAQDSLGNTVLHILILQPNKTFACQMYNLLLSYDRHGDHLQPLDLVPNHQGLTPFKLAGVEGNTVMFQHLMQKRKHTQWTYGPLTSTLYDLTEIDSSGDEQSLLELIITTKKREARQILDQTPVKELVSLKWKRYGRPYFCMLGAIYLLYIICFTMCCIYRPLKPRTNNRTSPRDNTLLQQKLLQEAYVTPKDDIRLVGELVTVIGAIIILLVEVPDIFRMGVTRFFGQTILGGPFHVLIITYAFMVLVTMVMRLISASGEVVPMSFALVLGWCNVMYFARGFQMLGPFTIMIQKMIFGDLMRFCWLMAVVILGFASAFYIIFQTEDPEELGHFYDYPMALFSTFELFLTIIDGPANYNVDLPFMYSITYAAFAIIATLLMLNLLIAMMGDTHWRVAHERDELWRAQVVATTVMLERKLPRCLWPRSGICGREYGLGDRWFLRVEDRQDLNRQRIQRYAQAFHTRGSEDLDKDSVEKLELGCPFSPHLSLPTPSVSRSTSRSSANWERLRQGTLRRDLRGIINRGLEDGESWEYQI

SEQ ID NO: 37749 - protein, 90 aa, Homo sapiens
  REGION 1..90: note = ENSP00000488490
MGVTRFFGQTILGGPFHVLIITYAFMVLVTMVMRLISASGEVVPMSFALVLGWCNVMYFARGFQMLGPFTIMIQKMIFGDLMRFCWLMAV

SEQ ID NO: 37750 - protein, 20 aa, Homo sapiens
  REGION 1..20: note = ENSP00000487762
  VARIANT 1: note = Any amino acid
XALNKLLKYEDCKVHQREAI

SEQ ID NO: 37751 - protein, 780 aa, Homo sapiens
  REGION 1..780: note = ENSP00000354543
MSKMPAKKKSCFQITSVTTAQVATSITEDTESLDDPDESRTEDVSSEIFDVSRATDYGPEEVCERSSSEETLNNVGDAETPGTVSPNLLLDGQLAAAAAAPANGGGVVSARSVSGALASTLAAAATSAPAPGAPGGPQLAGSSAGPVTAAPSQPPTTCSSRFRVIKLDHGSGEPYRRGRWTCMEYYERDSDSSVLTRSGDCIRHSSTFDQTAERDSGLGATGGSVVVVVASMQGAHGPESGTDSSLTAVSQLPPSEKMSQPTPAQPQSFSVGQPQPPPPPVGGAVAQSSAPLPPFPGAATGPQPMMAAAQPSQPQGAGPGGQTLPPTNVTLAQPAMSLPPQPGPAVGAPAAQQPQQFAYPQPQIPPGHLLPVQPSGQSEYLQQHVAGLQPPSPAQPSSTGAAASPATAATLPVGTGQNASSVGAQLMGASSQPSEAMAPRTGPAQGGQVAPCQPTGVPPATVGGVVQPCLGPAGAGQPQSVPPPQMGGSGPLSAVPGGPHAVVPGVPNVPAAVPAPSVPSVSTTSVTMPNVPAPLAQSQQLSSHTPVSRSSSIIQHVGLPLAPGTHSAPTSLPQSDLSQFQTQTQPLVGQVDDTRRKSEPLPQPPLSLIAENKPVVKPPVADSLANPLQLTPMNSLATSVFSIAIPVDGDEDRNPSTAFYQAFHLNTLKESKSLWDSASGGGVVAIDNKIEQAMDLVKSHLMYAVREEVEVLKEQIKELVERNSLLERENALLKSLSSNDQLSQLPTQQANPGSTSQQQAVIAQPPQPTQPPQQPNVSSA

SEQ ID NO: 37752 - protein, 116 aa, Homo sapiens
  REGION 1..116: note = ENSP00000418149
  VARIANT 1: note = Any amino acid
XLSSHTPVSRSSSIIQHVGLPLAPGTHSAPTSLPQSDLSQFQTQTQPLVGQVDDTRRKSEPLPQPPLSLIAENKPVVKPPVADSLANPLQLTPMNSLATSVFSIAIPVDGDEDRIW

SEQ ID NO: 37753 - protein, 204 aa, Homo sapiens
  REGION 1..204: note = ENSP00000417747
  VARIANT 1: note = Any amino acid
XIQHVGLPLAPGTHSAPTSLPQSDLSQFQTQTQPLVGQVDDTRRKSEPLPQPPLSLIAENKPVVKPPVADSLANPLQLTPMNSLATSVFSIAIPVDGDEDSASGGGVVAIDNKIEQAMDLVKSHLMYAVREEVEVLKEQIKELVERNSLLERENALLKSLSSNDQLSQLPTQQANPGSTSQQQAVIAQPPQPTQPPQQPNVSSA

SEQ ID NO: 37754 - protein, 81 aa, Homo sapiens
  REGION 1..81: note = ENSP00000420689
  VARIANT 1: note = Any amino acid
XENKPVVKPPVADSLANPLQLTPMNSLATSVFSIAIPVDGDEDRNPSTAFYQAFHLNTLKESKSLWDRIFFRIQHRRRNVT

SEQ ID NO: 37755 - protein, 77 aa, Homo sapiens
  REGION 1..77: note = ENSP00000361466
MDLVKNHLMYAVREEVEILKEQIRELVEKNSQLERENTLLKTLASPEQLEKFQSCLSPEEPAPESPQVPEAPGGSAV

SEQ ID NO: 37756 - protein, 134 aa, Homo sapiens
  REGION 1..134: note = ENSP00000361474
MNTEMYQTPMEVAVYQLHNFSISFFSSLLGGDVVSVKLDNSASGASVVAIDNKIEQAMDLVKNHLMYAVREEVEILKEQIRELVEKNSQLERENTLLKTLASPEQLEKFQSCLSPEEPAPESPQVPEAPGGSAV

SEQ ID NO: 37757 - protein, 200 aa, Homo sapiens
  REGION 1..200: note = ENSP00000314655
MAQSKLDCRSPVGLDCCNCCLDLAHRSGLQRGSSGENNNPGSPTVSNFRQLQEKLVFENLNTDKLNSIMRQDSLEPVLRDPCYLINEGICNRNIDQTMLSILLFFHSASGASVVAIDNKIEQAMDLVKNHLMYAVREEVEILKEQIRELVEKNSQLERENTLLKTLASPEQLEKFQSCLSPEEPAPESPQVPEAPGGSAV

SEQ ID NO: 37758 - protein, 200 aa, Homo sapiens; identical to SEQ ID NO: 37757
  REGION 1..200: note = ENSP00000361458

SEQ ID NO: 37759 - protein, 200 aa, Homo sapiens; identical to SEQ ID NO: 37757
  REGION 1..200: note = ENSP00000361459

SEQ ID NO: 37760 - protein, 110 aa, Homo sapiens
  REGION 1..110: note = ENSP00000361457
MAFQPPYSSSLFRKRDNASGASVVAIDNKIEQAMDLVKNHLMYAVREEVEILKEQIRELVEKNSQLERENTLLKTLASPEQLEKFQSCLSPEEPAPESPQVPEAPGGSAV

SEQ ID NO: 37761 - protein, 200 aa, Homo sapiens; identical to SEQ ID NO: 37757
  REGION 1..200: note = ENSP00000427427

SEQ ID NO: 37762 - protein, 132 aa, Homo sapiens
  REGION 1..132: note = ENSP00000421016
MRQDSLEPVLRDPCYLINEGICNRNIDQTMLSILLFFHSASGASVVAIDNKIEQAMDLVKNHLMYAVREEVEILKEQIRELVEKNSQLERENTLLKTLASPEQLEKFQSCLSPEEPAPESPQVPEAPGGSAV

SEQ ID NO: 37763 - protein, 25 aa, Homo sapiens
  REGION 1..25: note = ENSP00000425414
MDLVKNHLMYAVREEVEILKEQIRE

SEQ ID NO: 37764 - protein, 100 aa, Homo sapiens
  REGION 1..100: note = ENSP00000422060
MNTEMYQTPMEVAVYQLHNFSISFFSSLLGGDVVSVKLDNSASGASVVAIDNKIEQAMVSGITASFSSPDLAAAYVTLGRIEGMGEKALSQNPEEADSLP

SEQ ID NO: 37765 - protein, 124 aa, Homo sapiens
  REGION 1..124: note = ENSP00000427199
MAQSKLDCRSPVGLDCCNCCLDLAHRSGLQRGSSGENNNPGSPTVSNFRQLQEKLVFENLNTDKLNSIMRQDSLEPVLRDPCYLINEGICNRNIDQTMLSILLFFHSASGASVVAIDNKIEQAM

SEQ ID NO: 37766 - protein, 122 aa, Homo sapiens
  REGION 1..122: note = ENSP00000425155
MAQSKLDCRSPVGLDCCNCCLDLAHRSGLQRGSSGENNNPGSPTVSNFRQLQEKLVFENLNTDKLNSIMRQDSLEPVLRDPCYLINEGICNRNIDQTMLSILLFFHSASGASVVAIDNKIEQ

SEQ ID NO: 37767 - protein, 119 aa, Homo sapiens
  REGION 1..119: note = ENSP00000422636
MAQSKLDCRSPVGLDCCNCCLDLAHRSGLQRGSSGENNNPGSPTVSNFRQLQEKLVFENLNTDKLNSIMRQDSLEPVLRDPCYLINEGICNRNIDQTMLSILLFFHSASGASVVAIDNK

SEQ ID NO: 37768 - protein, 116 aa, Homo sapiens
  REGION 1..116: note = ENSP00000424653
MAQSKLDCRSPVGLDCCNCCLDLAHRSGLQRGSSGENNNPGSPTVSNFRQLQEKLVFENLNTDKLNSIMRQDSLEPVLRDPCYLINEGICNRNIDQTMLSILLFFHSASGASVVAI

SEQ ID NO: 37769 - protein, 100 aa, Homo sapiens
  REGION 1..100: note = ENSP00000427075
MAQSKLDCRSPVGLDCCNCCLDLAHRSGLQRGSSGENNNPGSPTVSNFRQLQEKLVFENLNTDKLNSIMRQDSLEPVLRDPCYLINEGICNRNIDQTMLS

SEQ ID NO: 37770 - protein, 84 aa, Homo sapiens
  REGION 1..84: note = ENSP00000425158
MAQSKLDCRSPVGLDCCNCCLDLAHRSGLQRGSSGENNNPGSPTVSNFRQLQEKLVFENLNTDKLNSIMRQDSLEPVLRDPCYL

SEQ ID NO: 37771 - protein, 58 aa, Homo sapiens
  REGION 1..58: note = ENSP00000422228
MAQSKLDCRSPVGLDCCNCCLDLAHRSGLQRGSSGENNNPGSPTVSNFRQLQEKLVFE

SEQ ID NO: 37772 - protein, 138 aa, Homo sapiens
  REGION 1..138: note = ENSP00000358530
MTALFLMSMLFGLTCGQAMSFCIPTEYTMHIERRECAYCLTINTTICAGYCMTRDINGKLFLPKYALSQDVCTYRDFIYRTVEIPGCPLHVAPYFSYPVALSCKCGKCNTDYSDCIHEAIKTNYCTKPQKSYLVGFSV

SEQ ID NO: 37773 - protein, 138 aa, Homo sapiens; identical to SEQ ID NO: 37772
  REGION 1..138: note = ENSP00000256592

SEQ ID NO: 37774 - protein, 1034 aa, Homo sapiens
  REGION 1..1034: note = ENSP00000360552
MPRRKQQAPKRAAGYAQEEQLKEEEEIKEEEEEEDSGSVAQLQGGNDTGTDEELETGPEQKGCFSYQNSPGSHLSNQDAENESLLSDASDQVSDIKSVCGRDASDKKAHTHVRLPNEAHNCMDKMTAVYANILSDSYWSGLGLGFKLSNSERRNCDTRNGSNKSDFDWHQDALSKSLQQNLPSRSVSKPSLFSSVQLYRQSSKMCGTVFTGASRFRCRQCSAAYDTLVELTVHMNETGHYQDDNRKKDKLRPTSYSKPRKRAFQDMDKEDAQKVLKCMFCGDSFDSLQDLSVHMIKTKHYQKVPLKEPVPTISSKMVTPAKKRVFDVNRPCSPDSTTGSFADSFSSQKNANLQLSSNNRYGYQNGASYTWQFEACKSQILKCMECGSSHDTLQQLTTHMMVTGHFLKVTSSASKKGKQLVLDPLAVEKMQSLSEAPNSDSLAPKPSSNSASDCTASTTELKKESKKERPEETSKDEKVVKSEDYEDPLQKPLDPTIKYQYLREEDLEDGSKGGGDILKSLENTVTTAINKAQNGAPSWSAYPSIHAAYQLSEGTKPPLPMGSQVLQIRPNLTNKLRPIAPKWKVMPLVSMPTHLAPYTQVKKESEDKDEAVKECGKESPHEEASSFSHSEGDSFRKSETPPEAKKTELGPLKEEEKLMKEGSEKEKPQPLEPTSALSNGCALANHAPALPCINPLSALQSVLNNHLGKATEPLRSPSCSSPSSSTISMFHKSNLNVMDKPVLSPASTRSASVSRRYLFENSDQPIDLTKSKSKKAESSQAQSCMSPPQKHALSDIADMVKVLPKATTPKPASSSRVPPMKLEMDVRRFEDVSSEVSTLHKRKGRQSNWNPQHLLILQAQFASSLFQTSEGKYLLSDLGPQERMQISKFTGLSMTTISHWLANVKYQLRKTGGTKFLKNMDKGHPIFYCSDCASQFRTPSTYISHLESHLGFQMKDMTRLSVDQQSKVEQEISRVSSAQRSPETIAAEEDTDSKFKCKLCCRTFVSKHAVKLHLSKTHSKSPEHHSQFVTDVDEE

SEQ ID NO: 37775 - protein, 1031 aa, Homo sapiens
  REGION 1..1031: note = ENSP00000475114
MMAAALLHYTGYAQEEQLKEEEEIKEEEEEEDSGSVAQLQGGNDTGTDEELETGPEQKGCFSYQNSPGSHLSNQDAENESLLSDASDQVSDIKSVCGRDASDKKAHTHVRLPNEAHNCMDKMTAVYANILSDSYWSGLGLGFKLSNSERRNCDTRNGSNKSDFDWHQDALSKSLQQNLPSRSVSKPSLFSSVQLYRQSSKMCGTVFTGASRFRCRQCSAAYDTLVELTVHMNETGHYQDDNRKKDKLRPTSYSKPRKRAFQDMDKEDAQKVLKCMFCGDSFDSLQDLSVHMIKTKHYQKVPLKEPVPTISSKMVTPAKKRVFDVNRPCSPDSTTGSFADSFSSQKNANLQLSSNNRYGYQNGASYTWQFEACKSQILKCMECGSSHDTLQQLTTHMMVTGHFLKVTSSASKKGKQLVLDPLAVEKMQSLSEAPNSDSLAPKPSSNSASDCTASTTELKKESKKERPEETSKDEKVVKSEDYEDPLQKPLDPTIKYQYLREEDLEDGSKGGGDILKSLENTVTTAINKAQNGAPSWSAYPSIHAAYQLSEGTKPPLPMGSQVLQIRPNLTNKLRPIAPKWKVMPLVSMPTHLAPYTQVKKESEDKDEAVKECGKESPHEEASSFSHSEGDSFRKSETPPEAKKTELGPLKEEEKLMKEGSEKEKPQPLEPTSALSNGCALANHAPALPCINPLSALQSVLNNHLGKATEPLRSPSCSSPSSSTISMFHKSNLNVMDKPVLSPASTRSASVSRRYLFENSDQPIDLTKSKSKKAESSQAQSCMSPPQKHALSDIADMVKVLPKATTPKPASSSRVPPMKLEMDVRRFEDVSSEVSTLHKRKGRQSNWNPQHLLILQAQFASSLFQTSEGKYLLSDLGPQERMQISKFTGLSMTTISHWLANVKYQLRKTGGTKFLKNMDKGHPIFYCSDCASQFRTPSTYISHLESHLGFQMKDMTRLSVDQQSKVEQEISRVSSAQRSPETIAAEEDTDSKFKCKLCCRTFVSKHAVKLHLSKTHSKSPEHHSQFVTDVDEE

SEQ ID NO: 37776 - protein, 194 aa, Homo sapiens
  REGION 1..194: note = ENSP00000474159
RKGRQSNWNPQHLLILQAQFASSLFQTSEGKYLLSDLGPQERMQISKFTGLSMTTISHWLANVKYQLRKTGGTKFLKNMDKGHPIFYCSDCASQFRTPSTYISHLESHLGFQMKDMTRLSVDQQSKVEQEISRVSSAQRSPETIAAEEDTDSKFKCKLCCRTFVSKHAVKLHLSKTHSKSPEHHSQFVTDVDEE

SEQ ID NO: 37777 - protein, 74 aa, Homo sapiens
  REGION 1..74: note = ENSP00000487408
MKFQECHSEVMRHGQKIYPSHHRIEMAVEIASLKCQHSSINQSPTRKNSNSTTGWLLWDLLMGIGNSGSNVVLT

SEQ ID NO: 37778 - protein, 1031 aa, Homo sapiens; identical to SEQ ID NO: 37775
  REGION 1..1031: note = ENSP00000333114

SEQ ID NO: 37779 - protein, 41 aa, Homo sapiens
  REGION 1..41: note = ENSP00000443890
MAHYKTEQDDWLIIYLKYLLFVFNFFFWVSEFCTHILFPEH

SEQ ID NO: 37780 - protein, 253 aa, Homo sapiens
  REGION 1..253: note = ENSP00000437403
MAHYKTEQDDWLIIYLKYLLFVFNFFFWVGGAAVLAVGIWTLVEKSGYLSVLASSTFAASAYILIFAGVLVMVTGFLGFGAILWERKGCLSTYFCLLLVIFLVELVAGVLAHVYYQRLSDELKQHLNRTLAENYGQPGATQITASVDRLQQDFKCCGSNSSADWQHSTYILLREAEGRQVPDSCCKTVVVRCGQRAHPSNIYKVEGGCLTKLEQFLADHLLLMGAVGIGVACLQICGMVLTCCLHQRLQRHFY

SEQ ID NO: 37781 - protein, 182 aa, Homo sapiens
  REGION 1..182: note = ENSP00000445503
MVTGFLGFGAILWERKGCLSTYFCLLLVIFLVELVAGVLAHVYYQRLSDELKQHLNRTLAENYGQPGATQITASVDRLQQDFKCCGSNSSADWQHSTYILLREAEGRQVPDSCCKTVVVRCGQRAHPSNIYKVEGGCLTKLEQFLADHLLLMGAVGIGVACLQICGMVLTCCLHQRLQRHFY

SEQ ID NO: 37782 - protein, 253 aa, Homo sapiens; identical to SEQ ID NO: 37780
  REGION 1..253: note = ENSP00000261177

SEQ ID NO: 37783 - protein, 270 aa, Homo sapiens
  REGION 1..270: note = ENSP00000396270
MHYYRYSNAKVSCWYKYLLFSYNIIFWLAGVVFLGVGLWAWSEKGVLSDLTKVTRMHGIDPVVLVLMVGVVMFTLGFAGCVGALRENICLLNFFCGTIVLIFFLELAVAVLAFLFQDWVRDRFREFFESNIKSYRDDIDLQNLIDSLQKANQCCGAYGPEDWDLNVYFNCSGASYSREKCGVPFSCCVPDPAQKVVNTQCGYDVRIQLKSKWDESIFTKGCIQALESWLPRNIYIVAGVFIAISLLQIFGIFLARTLISDIEAVKAGHHF

SEQ ID NO: 37784 - protein, 147 aa, Homo sapiens
  REGION 1..147: note = ENSP00000418195
MHYYRYSNAKVSCWYKYLLFSYNIIFWNQCCGAYGPEDWDLNVYFNCSGASYSREKCGVPFSCCVPDPAQKVVNTQCGYDVRIQLKSKWDESIFTKGCIQALESWLPRNIYIVAGVFIAISLLQIFGIFLARTLISDIEAVKAGHHF

SEQ ID NO: 37785 - protein, 223 aa, Homo sapiens
  REGION 1..223: note = ENSP00000361230
MERKVLPCFLCLFQGVLSDLTKVTRMHGIDPVVLVLMVGVVMFTLGFAGCVGALRENICLLNFFCGTIVLIFFLELAVAVLAFLFQDWVRDRFREFFESNIKSYRDDIDLQNLIDSLQKANQCCGAYGPEDWDLNVYFNCSGASYSREKCGVPFSCCVPDPAQKVVNTQCGYDVRIQLKSKWDESIFTKGCIQALESWLPRNIYIVAGVFIAISLLQIFGIFL

SEQ ID NO: 37786 - protein, 253 aa, Homo sapiens
  REGION 1..253: note = ENSP00000361237
MHYYRYSNAKVSCWYKYLLFSYNIIFWGVLSDLTKVTRMHGIDPVVLVLMVGVVMFTLGFAGCVGALRENICLLNFFCGTIVLIFFLELAVAVLAFLFQDWVRDRFREFFESNIKSYRDDIDLQNLIDSLQKANQCCGAYGPEDWDLNVYFNCSGASYSREKCGVPFSCCVPDPAQKVVNTQCGYDVRIQLKSKWDESIFTKGCIQALESWLPRNIYIVAGVFIAISLLQIFGIFLARTLISDIEAVKAGHHF

SEQ ID NO: 37787 - protein, 270 aa, Homo sapiens; identical to SEQ ID NO: 37783
  REGION 1..270: note = ENSP00000361231

SEQ ID NO: 37788 - protein, 213 aa, Homo sapiens
  REGION 1..213: note = ENSP00000344076
MHYYRYSNAKVSCWYKYLLFSYNIIFWLAGVVFLGVGLWAWSEKGVLSDLTKVTRMHGIDPVVLVLMVGVVMFTLGFAGCVGALRENICLLNFNQCCGAYGPEDWDLNVYFNCSGASYSREKCGVPFSCCVPDPAQKVVNTQCGYDVRIQLKSKWDESIFTKGCIQALESWLPRNIYIVAGVFIAISLLQIFGIFLARTLISDIEAVKAGHHF

SEQ ID NO: 37789 - protein, 270 aa, Homo sapiens; identical to SEQ ID NO: 37783
  REGION 1..270: note = ENSP00000361229

SEQ ID NO: 37790 - protein, 253 aa, Homo sapiens; identical to SEQ ID NO: 37786
  REGION 1..253: note = ENSP00000480263

SEQ ID NO: 37791 - protein, 294 aa, Homo sapiens
  REGION 1..294: note = ENSP00000362387
MPRGDSEQVRYCARFSYLWLKFSLIIYSTVFWLIGALVLSVGIYAEVERQKYKTLESAFLAPAIILILLGVVMFMVSFIGVLASLRDNLYLLQAFMYILGICLIMELIGGVVALTFRNQTIDFLNDNIRRGIENYYDDLDFKNIMDFVQKKFKCCGGEDYRDWSKNQYHDCSAPGPLACGVPYTCCIRNTTEVVNTMCGYKTIDKERFSVQDVIYVRGCTNAVIIWFMDNYTIMAGILLGILLPQFLGVLLTLLYITRVEDIIMEHSVTDGLLGPGAKPSVEAAGTGCCLCYPN

SEQ ID NO: 37792 - protein, 160 aa, Homo sapiens
  REGION 1..160: note = ENSP00000404528
LQAFMYILGICLIMELIGGVVALTFRNQTIDFLNDNIRRGIENYYDDLDFKNIMDFVQKKFKCCGGEDYRDWSKNQYHDCSAPGPLACGVPYTCCIRNTTEVVNTMCGYKTIDKERFSVQDVIYVRGCTNAVIIWFMDNYTIMAGILLGILLPQITGVSD

SEQ ID NO: 37793 - protein, 146 aa, Homo sapiens
  REGION 1..146: note = ENSP00000433592
MEGDCLSCMKYLMFVFNFFIFLGGACLLAIGIWVMVDPTGFREIVAANPLLLTGAYILLAMGGLLFLLGFLGCCGAVRENKCLLLFFFLFILIIFLAELSAAILAFIFRENLTREFFTKELTKHYQGNNDTDVFSATWNSVMITVS

SEQ ID NO: 37794 - protein, 79 aa, Homo sapiens
  REGION 1..79: note = ENSP00000434625
MEGDCLSCMKYLMFVFNFFIFLGGACLLAIGIWVMVDPTGFREIVAANPLLLTGAYILLAMGGLLFLLGFLGCCGAVRE

SEQ ID NO: 37795 - protein, 138 aa, Homo sapiens
  REGION 1..138: note = ENSP00000433362
MEGDCLSCMKYLMFVFNFFIFFFLFILIIFLAELSAAILAFIFRENLTREFFTKELTKHYQGNNDTDVFSATWNSVMITFGCCGVNGPEDFKFASVFRLLTLDSEEVPEACCRREPQSRDGVLLSREECLLGRSLFLN

SEQ ID NO: 37796 - protein, 248 aa, Homo sapiens
  REGION 1..248: note = ENSP00000429993
MEGDCLSCMKYLMFVFNFFIFLGGACLLAIGIWVMVDPTGFREIVAANPLLLTGAYILLAMGGLLFLLGFLGCCGAVRENKCLLLFFFLFILIIFLAELSAAILAFIFRENLTREFFTKELTKHYQGNNDTDVFSATWNSVMITFGCCGVNGPEDFKFASVFRLLTLDSEEVPEACCRREPQSRDGVLLSREECLLGRSLFLNKQGCYTVILNTFETYVYLAGALAIGVLAIELFAMIFAMCLFRGIQ

SEQ ID NO: 37797 - protein, 157 aa, Homo sapiens
  REGION 1..157: note = ENSP00000427942
MPEELPRWSTMEGDCLSCMKYLMFVFNFFIFLGGACLLAIGIWVMVDPTGFREIVAANPLLLTGAYILLAMGGLLFLLGFLGCCGAVRENKCLLLFFFLFILIIFLAELSAAILAFIFRENLTREFFTKELTKHYQGNNDTDVFSATWNSVMITVSD

SEQ ID NO: 37798 - protein, 76 aa, Homo sapiens
  REGION 1..76: note = ENSP00000430343
MPEELPRWSTMEGDCLSCMKYLMFVFNFFIFLGGACLLAIGIWVMVDPTGFREIVAANPLLLTGAYILLAMGGLLF

SEQ ID NO: 37799 - protein, 271 aa, Homo sapiens
  REGION 1..271: note = ENSP00000429020
  VARIANT 1: note = Any amino acid
XWSTMEGDCLSCMKYLMFVFNFFIFLGGACLLAIGIWVMVDPTGFREIVAANPLLLTGAYILLAMGGLLFLLGFLGCCGAVRENKCLLLFFFLFILIIFLAELSAAILAFIFRENLTREFFTKELTKHYQGNNDTDVFSATWNSVMITFGCCGVNGPEDFKFASVFRLLTLDSEEVPEACCRREPQSRDGVLLSREECLLGRSLFLNKQGCYTVILNTFETYVYLAGALAIGVLAIEEERAHSVSQATGILYQLPASPQAFQSPGTLGATA

SEQ ID NO: 37800 - protein, 248 aa, Homo sapiens; identical to SEQ ID NO: 37796
  REGION 1..248: note = ENSP00000339820

SEQ ID NO: 37801 - protein, 221 aa, Homo sapiens
  REGION 1..221: note = ENSP00000358529
MGRFRGGLRCIKYLLLGFNLLFWLAGSAVIAFGLWFRFGGAIKELSSEDKSPEYFYVGLYVLVGAGALMMAVGFFGCCGAMRESQCVLGSFFTCLLVIFAAEVTTGVFAFIGKGVAIRHVQTMYEEAYNDYLKDRGKGNGTLITFHSTFQCCGKESSEQVQPTCPKELLGHKNCIDEIETIISVKLQLIGIVGIGIAGLTIFGMIFSMVLCCAIRNSRDVI

SEQ ID NO: 37802 - protein, 196 aa, Homo sapiens
  REGION 1..196: note = ENSP00000358528
MGRFRGGLRCIKYLLLGFNLLFWLAGSAVIAFGLWFRFGGAIKELSSEDKSPEYFYVGLYVLVGAGALMMAVGFFGCCGAMRESQCVLGSAIRHVQTMYEEAYNDYLKDRGKGNGTLITFHSTFQCCGKESSEQVQPTCPKELLGHKNCIDEIETIISVKLQLIGIVGIGIAGLTIFGMIFSMVLCCAIRNSRDVI

SEQ ID NO: 37803 - protein, 187 aa, Homo sapiens
  REGION 1..187: note = ENSP00000415256
GLRCIKYLLLGFNLLFWLAGSAVIAFGLWFRFGGAIKELSSEDKSPEYFYVGLYVLVGAGALMMAVGFFGCCGAMRESQCVLGSFFTCLLVIFAAEVTTGVFAFIGKGVAIRHVQTMYEEAYNDYLKDRGKGNGTLITFHSTFQCCGKESSEQVQPTCPKELLGHKIFGMIFSMVLCCAIRNSRDVI

SEQ ID NO: 37804 - protein, 193 aa, Homo sapiens
  REGION 1..193: note = ENSP00000421808
MSGKHYKGPEVSCCIKYFIFGFNVIFWFLGITFLGIGLWAWNEKGVLSNISSITDLGGFDPVWLFLVVGGVMFILGFAGCIGALRENTFLLKFFSVFLGIIFFLELTAGVLAFVFKDWIKDQLYFFINNNIRAYRDDIDLQNLIDFTQEYIPMQVESDVAFHSPAALKIPQKMSSTLSVAMMPGKNQKLTSRL

SEQ ID NO: 37805 - protein, 268 aa, Homo sapiens
  REGION 1..268: note = ENSP00000307701
MSGKHYKGPEVSCCIKYFIFGFNVIFWFLGITFLGIGLWAWNEKGVLSNISSITDLGGFDPVWLFLVVGGVMFILGFAGCIGALRENTFLLKFFSVFLGIIFFLELTAGVLAFVFKDWIKDQLYFFINNNIRAYRDDIDLQNLIDFTQEYWQCCGAFGADDWNLNIYFNCTDSNASRERCGVPFSCCTKDPAEDVINTQCGYDARQKPEVDQQIVIYTKGCVPQFEKWLQDNLTIVAGIFIGIALLQIFGICLAQNLVSDIEAVRASW

SEQ ID NO: 37806 - protein, 197 aa, Homo sapiens
  REGION 1..197: note = ENSP00000423916
MFILGFAGCIGALRENTFLLKFFSVFLGIIFFLELTAGVLAFVFKDWIKDQLYFFINNNIRAYRDDIDLQNLIDFTQEYWQCCGAFGADDWNLNIYFNCTDSNASRERCGVPFSCCTKDPAEDVINTQCGYDARQKPEVDQQIVIYTKGCVPQFEKWLQDNLTIVAGIFIGIALLQIFGICLAQNLVSDIEAVRASW

SEQ ID NO: 37807 - protein, 87 aa, Homo sapiens
  REGION 1..87: note = ENSP00000422351
  VARIANT 1: note = Any amino acid
XVSCCIKYFIFGFNVIFWFLGITFLGIGLWAWNEKGVLSNISSITDLGGFDPVWLFLVVGGVMFILGFAGCIGALRENTFLLKFDKQ

SEQ ID NO: 37808 - protein, 110 aa, Homo sapiens
  REGION 1..110: note = ENSP00000423504
MFILGFAGCIGALRENTFLLKFFSVFLGIIFFLELTAGVLAFVFKDWIKDQLYFFINNNIRAYRDDIDLQNLIDFTQEYWQCCGAFGADDWNLNIYFNCTDSNASRERCG

SEQ ID NO: 37809 - protein, 60 aa, Homo sapiens
  REGION 1..60: note = ENSP00000426248
MFILGFAGCIGALRENTFLLKFFSVFLGIIFFLELTAGVLAFVFKDWIKDQLYFFINNNI

SEQ ID NO: 37810 - protein, 38 aa, Homo sapiens
  REGION 1..38: note = ENSP00000422548
MFILGFAGCIGALRENTFLLKFLKSPVLTEQAENYTFL

SEQ ID NO: 37811 - protein, 245 aa, Homo sapiens
  REGION 1..245: note = ENSP00000362111
MASPSRRLQTKPVITCFKSVLLIYTFIFWITGVILLAVGIWGKVSLENYFSLLNEKATNVPFVLIATGTVIILLGTFGCFATCRASAWMLKLYAMFLTLVFLVELVAAIVGFVFRHEIKNSFKNNYEKALKQYNSTGDYRSHAVDKIQNTLHCCGVTDYRDWTDTNYYSEKGFPKSCCKLEDCTPQRDADKVNNEGCFIKVMTIIESEMGVVAGISFGVACFQLIGIFLAYCLSRAITNNQYEIV

SEQ ID NO: 37812 - protein, 129 aa, Homo sapiens
  REGION 1..129: note = ENSP00000482130
MLKLYAMFLTLVFLVELVAAIVGFVFRHEIKNSFKNNYEKALKQYNSTGDYRSHAVDKIQNTLHCCGVTDYRDWTDTNYYSEKGFPKSCCKLEDCTPQRDADKVNNELIGIFLAYCLSRAITNNQYEIV

SEQ ID NO: 37813 - protein, 137 aa, Homo sapiens
  REGION 1..137: note = ENSP00000482894
MLKLYAMFLTLVFLVELVAAIVGFVFRHEIKNSFKNNYEKALKQYNSTGDYRSHAVDKIQNTLHCCGVTDYRDWTDTNYYSEKGFPKSCCKLEDCTPQRDADKVNNEGCFIKVMTIIESEMGVVAGISFGVACFQDI

SEQ ID NO: 37814 - protein, 171 aa, Homo sapiens
  REGION 1..171: note = ENSP00000462518
RRSKKAESEGPAQPCPGPPKLVPSADLKAPHSMVAAFDYNPQESSPNMDVEAELPFRAGDVITVFGGMDDDGFYYGELNGQRGLVPSNFLEGPGPEAGGLDREPRTPQAESQDWGCTTQGSPGPPGGPCTPSSGSAPRIERGEPQGRSEKVWGFFSKGKQLLRRLGSGKKE

SEQ ID NO: 37815 - protein, 1797 aa, Homo sapiens
  REGION 1..1797: note = ENSP00000268893
MEQLTTLPRPGDPGAMEPWALPTWHSWTPGRGGEPSSAAPSIADTPPAALQLQELRSEESSKPKGDGSSRPVGGTDPEGAEACLPSLGQQASSSGPACQRPEDEEVEAFLKAKLNMSFGDRPNLELLRALGELRQRCAILKEENQMLRKSSFPETEEKVRRLKRKNAELAVIAKRLEERARKLQETNLRVEGPQWLHVRDFDRLLRESQREVLRLQRQIALRNQRETLPLPPSWPPGPALQARAGAPAPGAPGEATPQEDADNLPVILGEPEKEQRVQQLESELSKKRKKCESLEQEARKKQRRCEELELQLRQAQNENARLVEENSRLSGRATEKEQVEWENAELRGQLLGVTQERDSALRKSQGLQSKLESLEQVLKHMREVAQRRQQLEVEHEQARLSLREKQEEVRRLQQAQAEAQREHEGAVQLLESTLDSMQARVRELEEQCRSQTEQFSLLAQELQAFRLHPGPLDLLTSALDCGSLGDCPPPPCCCSIPQPCRGSGPKDLDLPPGSPGRCTPKSSEPAPATLTGVPRRTAKKAESLSNSSHSESIHNSPKSCPTPEVDTASEVEELEADSVSLLPAAPEGSRGGARIQVFLARYSYNPFEGPNENPEAELPLTAGEYIYIYGNMDEDGFFEGELMDGRRGLVPSNFVERVSDDDLLTSLPPELADLSHSSGPELSFLSVGGGGSSSGGQSSVGRSQPRPEEEDAGDELSLSPSPEGLGEPPAVPYPRRLVVLKQLAHSVVLAWEPPPEQVELHGFHICVNGELRQALGPGAPPKAVLENLDLWAGPLHISVQALTSRGSSDPLRCCLAVGARAGVVPSQLRVHRLTATSAEITWVPGNSNLAHAIYLNGEECPPASPSTYWATFCHLRPGTPYQAQVEAQLPPQGPWEPGWERLEQRAATLQFTTLPAGPPDAPLDVQIEPGPSPGILIISWLPVTIDAAGTSNGVRVTGYAIYADGQKIMEVASPTAGSVLVELSQLQLLQVCREVVVRTMSPHGESADSIPAPITPALAPASLPARVSCPSPHPSPEARAPLASASPGPGDPSSPLQHPAPLGTQEPPGAPPASPSREMAKGSHEDPPAPCSQEEAGAAVLGTSEERTASTSTLGEKDPGPAAPSLAKQEAEWTAGEACPASSSTQGARAQQAPNTEMCQGGDPGSGLRPRAEKEDTAELGVHLVNSLVDHGRNSDLSDIQEEEEEEEEEEEEELGSRTCSFQKQVAGNSIRENGAKSQPDPFCETDSDEEILEQILELPLQQFCSKKLFSIPEEEEEEEEDEEEEKSGAGCSSRDPGPPEPALLGLGCDSGQPRRPGQCPLSPESSRAGDCLEDMPGLVGGSSRRRGGGSPEKPPSRRRPPDPREHCSRLLSNNGPQASGRLGPTRERGGLPVIEGPRTGLEASGRGRLGPSRRCSRGRALEPGLASCLSPKCLEISIEYDSEDEQEAGSGGISITSSCYPGDGEAWGTATVGRPRGPPKANSGPKPYPRLPAWEKGEPERRGRSATGRAKEPLSRATETGEARGQDGSGRRGPQKRGVRVLRPSTAELVPARSPSETLAYQHLPVRIFVALFDYDPVSMSPNPDAGEEELPFREGQILKVFGDKDADGFYQGEGGGRTGYIPCNMVAEVAVDSPAGRQQLLQRGYLSPDILLEGSGNGPFVYSTAHTTGPPPKPRRSKKAESEGPAQPCPGPPKLVPSADLKAPHSMVAAFDYNPQESSPNMDVEAELPFRAGDVITVFGGMDDDGFYYGELNGQRGLVPSNFLEGPGPEAGGLDREPRTPQAESQRTRRRRVQC

SEQ ID NO: 37816 - protein, 1857 aa, Homo sapiens
  REGION 1..1857: note = ENSP00000345824
MEQLTTLPRPGDPGAMEPWALPTWHSWTPGRGGEPSSAAPSIADTPPAALQLQELRSEESSKPKGDGSSRPVGGTDPEGAEACLPSLGQQASSSGPACQRPEDEEVEAFLKAKLNMSFGDRPNLELLRALGELRQRCAILKEENQMLRKSSFPETEEKVRRLKRKNAELAVIAKRLEERARKLQETNLRVVSAPLPRPGTSLELCRKALARQRARDLSETASALLAKDKQIAALQRECRELQARLTLVGKEGPQWLHVRDFDRLLRESQREVLRLQRQIALRNQRETLPLPPSWPPGPALQARAGAPAPGAPGEATPQEDADNLPVILGEPEKEQRVQQLESELSKKRKKCESLEQEARKKQRRCEELELQLRQAQNENARLVEENSRLSGRATEKEQVEWENAELRGQLLGVTQERDSALRKSQGLQSKLESLEQVLKHMREVAQRRQQLEVEHEQARLSLREKQEEVRRLQQAQAEAQREHEGAVQLLESTLDSMQARVRELEEQCRSQTEQFSLLAQELQAFRLHPGPLDLLTSALDCGSLGDCPPPPCCCSIPQPCRGSGPKDLDLPPGSPGRCTPKSSEPAPATLTGVPRRTAKKAESLSNSSHSESIHNSPKSCPTPEVDTASEVEELEADSVSLLPAAPEGSRGGARIQVFLARYSYNPFEGPNENPEAELPLTAGEYIYIYGNMDEDGFFEGELMDGRRGLVPSNFVERVSDDDLLTSLPPELADLSHSSGPELSFLSVGGGGSSSGGQSSVGRSQPRPEEEDAGDELSLSPSPEGLGEPPAVPYPRRLVVLKQLAHSVVLAWEPPPEQVELHGFHICVNGELRQALGPGAPPKAVLENLDLWAGPLHISVQALTSRGSSDPLRCCLAVGARAGVVPSQLRVHRLTATSAEITWVPGNSNLAHAIYLNGEECPPASPSTYWATFCHLRPGTPYQAQVEAQLPPQGPWEPGWERLEQRAATLQFTTLPAGPPDAPLDVQIEPGPSPGILIISWLPVTIDAAGTSNGVRVTGYAIYADGQKIMEVASPTAGSVLVELSQLQLLQVCREVVVRTMSPHGESADSIPAPITPALAPASLPARVSCPSPHPSPEARAPLASASPGPGDPSSPLQHPAPLGTQEPPGAPPASPSREMAKGSHEDPPAPCSQEEAGAAVLGTSEERTASTSTLGEKDPGPAAPSLAKQEAEWTAGEACPASSSTQGARAQQAPNTEMCQGGDPGSGLRPRAEKEDTAELGVHLVNSLVDHGRNSDLSDIQEEEEEEEEEEEEELGSRTCSFQKQVAGNSIRENGAKSQPDPFCETDSDEEILEQILELPLQQFCSKKLFSIPEEEEEEEEDEEEEKSGAGCSSRDPGPPEPALLGLGCDSGQPRRPGQCPLSPESSRAGDCLEDMPGLVGGSSRRRGGGSPEKPPSRRRPPDPREHCSRLLSNNGPQASGRLGPTRERGGLPVIEGPRTGLEASGRGRLGPSRRCSRGRALEPGLASCLSPKCLEISIEYDSEDEQEAGSGGISITSSCYPGDGEAWGTATVGRPRGPPKANSGPKPYPRLPAWEKGEPERRGRSATGRAKEPLSRATETGEARGQDGSGRRGPQKRGVRVLRPSTAELVPARSPSETLAYQHLPVRIFVALFDYDPVSMSPNPDAGEEELPFREGQILKVFGDKDADGFYQGEGGGRTGYIPCNMVAEVAVDSPAGRQQLLQRGYLSPDILLEGSGNGPFVYSTAHTTGPPPKPRRSKKAESEGPAQPCPGPPKLVPSADLKAPHSMVAAFDYNPQESSPNMDVEAELPFRAGDVITVFGGMDDDGFYYGELNGQRGLVPSNFLEGPGPEAGGLDREPRTPQAESQRTRRRRVQC

SEQ ID NO: 37817 - protein, 270 aa, Homo sapiens
  REGION 1..270: note = ENSP00000462822
  VARIANT 1: note = Any amino acid
XAKEPLSRATETGEARGQDGSGRRGPQKRGVRVLRPSTAELVPARSPSETLAYQHLPVRIFVALFDYDPVSMSPNPDAGEEELPFREGQILKVFGDKDADGFYQGEGGGRTGYIPCNMVAEVAVDSPAGRQQLLQRGYLSPDILLEGSAHTTGPPPKPRRSKKAESEGPAQPCPGPPKLVPSADLKAPHSMVAAFDYNPQESSPNMDVEAELPFRAGDVITVFGGMDDDGFYYGELNGQRGLVPSNFLEGPGPEAGGLDREPRTPQAESQ

SEQ ID NO: 37818 - protein, 296 aa, Homo sapiens
  REGION 1..296: note = ENSP00000462710
  VARIANT 1: note = Any amino acid
XAAVLGTSEERTASTSTLGEKDPGPAAPSLAKQEAEWTAGEACPASSSTQGARAQQAPNTEMCQGGDPGSGLRPRAEKEDTAELGVHLVNSLVDHGRNSDLSDIQEEEEEEEEEEEEELGSRTCSFQKQVAGNSIRENGAKATETGEARGQDGSGRRGPQKRGVRVLRPSTAELVPARSPSETLAYQHLPVRIFVALFDYDPVSMSPNPDAGEEELPFREGQILKVFGDKDADGFYQGEGGGRTGYIPCNMVAEVAVDSPAGRQQLLQRGYLSPDILLEGSAHTTGPPPKPRRSKK

SEQ ID NO: 37819 - protein, 516 aa, Homo sapiens
  REGION 1..516: note = ENSP00000342499
MPSSTSPDQGDDLENCILRFSDLDLKDMSLINPSSSLKAELDGSTKKKYSFAKKKAFALFVKTKEVPTKRSFECKEKLWKCCRQLFTDQTSIHRHVATQHADEIYHQTASILKQLAVTLSTSKSLSSADEKNPLKECLPHSHDVSAWLPDISCFNPDELISGQGSEEGEVLLYYCYHDLEDPQWICAWQTALCQHLHLTGKIRIAAEGINGTVGGSKLATRLYVEVMLSFPLFKDDLCKDDFKTSKGGAHCFPELRVGVFEEIVPMGISPKKISYKKPGIHLSPGEFHKEVEKFLSQANQEQSDTILLDCRNFYESKIGRFQGCLAPDIRKFSYFPSYVDKNLELFREKRVLMYCTGGIRCERGSAYLKAKGVCKEVFQLKGGIHKYLEEFPDGFYKGKLFVFDERYALSYNSDVVSECSYCGARWDQYKLCSTPQCRQLVLTCPACQGQGFTACCVTCQDKGSRKVSGPMQDSFKEECECTARRPRIPRELLQHVRQPVSPEPGPDADEDGPVLM

SEQ ID NO: 37820 - protein, 59 aa, Homo sapiens
  REGION 1..59: note = ENSP00000364315
MPSSTSPDQGDDLENCILRFSDLDLKDMSLINPSSSLKAELDGSTKKKYSFAKKKVEFL

SEQ ID NO: 37821 - protein, 7 aa, Homo sapiens
  REGION 1..7: note = ENSP00000364308
  VARIANT 1: note = Any amino acid
XKKVEFL

SEQ ID NO: 37822 - protein, 361 aa, Homo sapiens
  REGION 1..361: note = ENSP00000422188
MQASPIRIPTVSNDIDWDFCFHMSQQTEIPAHQQTDELYPTGGCGESEEETKAKEKEKAIDCMSHPKEKLAQSQKKVAQLIKEKMNTQANKELIRCVILSRIIFGDHHWKCARALANLAYGYLTLRGLPVQAKKHATSAKNTLLTWKANTTSNKEKEEILEALVKLYYTLGVAWLLQNRGREAYFNLQKAERNMKELKELYKGGVCELQVSENDLTLALGRASLAIHRLNLALAYFEKAIGDVIAAKGDRTSDLISLYEEAAQIEQLRRNHNQAIQYLQQAHSVCVSLFTEVSPKTAEMSALLAKAYAMSGEAQHRDAVEIYFIRSINAYRATLGSEDFETLSTTEEFCKWLVQNGEKQDK

SEQ ID NO: 37823 - protein, 49 aa, Homo sapiens
  REGION 1..49: note = ENSP00000424418
MQASPIRIPTVSNDIDWDFCFHMPPSSGQETCYISQEYTVDLEGKYDLK

SEQ ID NO: 37824 - protein, 287 aa, Homo sapiens
  REGION 1..287: note = ENSP00000425242
MQASPIRIPTVSNDIDWDFCFHMSQQTEIPAHQQTDELYPTGGCGESEEETKAKEKEKAIDCMSHPKEKLAQSQKKVAQLIKEKMNTQANKELIRCVILSRIIFGDHHWKCARALANLAYGYLTLRGLPVQAKKHATSAKNTLLTWKANTTSNKEKEEILEALVKLYYTLGVAWLLQNRGREAYFNLQKAERNMKELKELYKGGVCELQVSENDLTLALGRASLAIHRLNLALAYFEKAIGDVIAAKGDRTSDLISLYEEAAQIEQLRRNHNQAIQYLQQMLLRYIS

SEQ ID NO: 37825 - protein, 287 aa, Homo sapiens; identical to SEQ ID NO: 37824
  REGION 1..287: note = ENSP00000484792

SEQ ID NO: 37826 - protein, 359 aa, Homo sapiens
  REGION 1..359: note = ENSP00000491000
MQASPIRIPTVSNDIDWDFCFHMSQQTEIPAHQQTDELYPTGGCGESEEETKAKEKEKAIDCMSHPKEKLAQSQKKVAQLIKEKMNTQANKELIRCVILSRIIFGDHHWKCARALANLAYGYLTLRGLPVQAKKHATSAKNTLLTWKANTTSNKEKEEILEALVKLYYTLGVAWLLQNRGREAYFNLQKAERNMKELKELYKGGVCELQVSENDLTLALGRASLAIHRLNLALAYFEKAIGDVIAAKGDRTSDLISLYEEAAQIEQLRRNHNQAIQYLQQAHSVCVSLFTEVSPKTAEMSALLAKAYAMSGEAQHRDAVEIYFIRSINAYRATLGSEDFETLSTTEEFCKWLVQNGEKQ

SEQ ID NO: 37827 - protein, 2481 aa, Homo sapiens
  REGION 1..2481: note = ENSP00000381003
MEQSPPPAPEPTQGPTPARSRRRREPESPPASAPIPLFGADTIGQRSPDGPVLSKAEFVEKVRQSNQACHDGDFHTAIVLYNEALAVDPQNCILYSNRSAAYMKIQQYDKALDDAIKARLLNPKWPKAYFRQGVALQYLGRHADALAAFASGLAQDPKSLQLLVGMVEAAMKSPMRDSLEPTYQQLQKMKLDKSPFVVVSVVGQELLTAGHHGASVVVLEAALKIGTCSLKLRGSVFSALSSAYWSLGNTEKSTGYMQQDLDVAKTLGDQTGECRAHGNLGSAFFSKGNYREALTNHRHQLVLAMKLKDREAASSALSSLGHVYTAIGDYPNALASHKQCVLLAKQSKDELSEARELGNMGAVYIAMGDFENAVQCHEQHLKIAKDLGNKREEARAYSNLGSAYHYRRNFDKAMSYHNYVLELAQELMEKAIEMRAYAGLGHAARCMQDLERAKQYHEQQLGIAEDLKDRAAEGRASSNLGIIHQMKGDYDTALKLHKTHLCIAQELSDYAAQGRAYGNMGNAYNALGMYDQAVKYHRQELQISMEVNDRASQASTHGNLAVAYQALGAHDRALQHYQNHLNIARELRDIQSEARALSNLGNFHCSRGEYVQAAPYYEQYLRLAPDLQDMEGEGKVCHNLGYAHYCLGNYQEAVKYYEQDLALAKDLHDKLSQAKAYCNLGLAFKALLNFSKAEECQKYLLSLAQSLNNSQAKFRALGNLGDIFICKKDINGAIKFYEQQLGLAHQVKDRRLEASAYAALGTAYRMIQKYDKALGYHTQELEVYQELSDLPGECRAHGHLAAVYMALGKYTMAFKCYEEQLDLGQKLKDPSLEAQVYGNMGITKMNMNVMEEAIGYFEQQLAMLQQLSGNESVLDRGRAYGNLGDCYEALGDYEEAIKYYEQYLSVAQSLNRMQDQAKAYRGLGNGHRAMGSLQQALVCFEKRLVVAHELGEAFNKAQAYGELGSLHSQLGNYEQAISCLERQLNIARDMKDRALESDAACGLGGVYQQMGEYDTALQYHQLDLQIAEETNNPTCQGRAYGNLGLTYESLGTFERAVVYQEQHLSIAAQMNDLAAKTVSYSSLGRTHHALQNYSQAVMYLQEGLRLAEQLGRREDEAKIRHGLGLSLWASGNLEEAQHQLYRASALFETIRHEAQLSTDYKLSLFDLQTSSYQALQRVLVSLGHHDEALAVAERGRTRAFADLLVERQTGQQDSDPYSPVTIDQILEMVNGQRGLVLYYSLAAGYLYSWLLAPGAGIVKFHEHYLGENTVENSSDFQASSSVTLPTATGSALEQHIASVREALGVESHYSRACASSETESEAGDIMDQQFEEMNNKLNSVTDPTGFLRMVRRNNLFNRSCQSMTSLFSNTVSPTQDGTSSLPRRQSSFAKPPLRALYDLLIAPMEGGLMHSSGPVGRHRQLILVLEGELYLIPFALLKGSSSNEYLYERFGLLAVPSIRSLSVQSKSHLRKNPPTYSSSTSMAAVIGNPKLPSAVMDRWLWGPMPSAEEEAYMVSELLGCQPLVGSVATKERVMSALTQAECVHFATHISWKLSALVLTPSMDGNPASSKSSFGHPYTIPESLRVQDDASDGESISDCPPLQELLLTAADVLDLQLPVKLVVLGSSQESNSKVTADGVIALTRAFLAAGAQCVLVSLWPVPVAASKMFIHAFYSSLLNGLKASAALGEAMKVVQSSKAFSHPSNWAGFMLIGSDVKLNSPSSLIGQALTEILQHPERARDALRVLLHLVEKSLQRIQNGQRNAMYTSQQSVENKVGGIPGWQALLTAVGFRLDPPTSGLPAAVFFPTSDPGDRLQQCSSTLQSLLGLPNPALQALCKLITASETGEQLISRAVKNMVGMLHQVLVQLQAGEKEQDLASAPIQVSISVQLWRLPGCHEFLAALGFDLCEVGQEEVILKTGKQANRRTVHFALQSLLSLFDSTELPKRLSLDSSSSLESLASAQSVSNALPLGYQQPPFSPTGADSIASDAISVYSLSSIASSMSFVSKPEGGSEGGGPGGRQDHDRSKNAYLQRSTLPRSQLPPQTRPAGNKDEEEYEGFSIISNEPLATYQENRNTCFSPDHKQPQPGTAGGMRVSVSSKGSISTPNSPVKMTLIPSPNSPFQKVGKLASSDTGESDQSSTETDSTVKSQEESNPKLDPQELAQKILEETQSHLIAVERLQRSGGQVSKSNNPEDGVQAPSSTAVFRASETSAFSRPVLSHQKSQPSPVTVKPKPPARSSSLPKVSSGYSSPTTSEMSIKDSPSQHSGRPSPGCDSQTSQLDQPLFKLKYPSSPYSAHISKSPRNMSPSSGHQSPAGSAPSPALSYSSAGSARSSPADAPDIDKLKMAAIDEKVQAVHNLKMFWQSTPQHSTGPMKIFRGAPGTMTSKRDVLSLLNLSPRHNKKEEGVDKLELKELSLQQHDGAPPKAPPNGHWRTETTSLGSLPLPAGPPATAPARPLRLPSGNGYKFLSPGRFFPSSKC

SEQ ID NO: 37828 - protein, 301 aa, Homo sapiens
  REGION 1..301: note = ENSP00000410244
DVKLNSPSSLIGQALTEILQHPERARDALRVLLHLVEKSLQRIQNGQRNAMYTSQQSVENKVGGIPGWQALLTAVGFRLDPPTSGLPAAVFFPTSDPGDRLQQCSSTLQSLLGLPNPALQALCKLITASETGEQLISRLHQVLVQLQAGEKEQDLASAPIQVSISVQLWRLPGCHEFLAALGFDLCEVGQEEVILKTGKQANRRTVHFALQSLLSLFDSTELPKRLSLDSSSSLESLASAQSVSNALPLGYQQPPFSPTGADSIASDAISVYSLSSIASSMSFVSKPEGGSEGGGPGGRQD

SEQ ID NO: 37829 - protein, 108 aa, Homo sapiens
  REGION 1..108: note = ENSP00000388788
EQHIASVREALGVESHYSRACASSETESEAGDIMDQQFEEMNNKLNSVTDPTGFLRMVRRNNLFNRDATRFAEAWDWAWTHVLALPTSQPVKAGDTYLHQVMQAVVIN

SEQ ID NO: 37830 - protein, 2354 aa, Homo sapiens
  REGION 1..2354: note = ENSP00000479834
AYFRQGVALQYLGRHADALAAFASGLAQDPKSLQLLVGMVEAAMKSPMRDSLEPTYQQLQKMKLDKSPFVVVSVVGQELLTAGHHGASVVVLEAALKIGTCSLKLRGSVFSALSSAYWSLGNTEKSTGYMQQDLDVAKTLGDQTGECRAHGNLGSAFFSKGNYREALTNHRHQLVLAMKLKDREAASSALSSLGHVYTAIGDYPNALASHKQCVLLAKQSKDELSEARELGNMGAVYIAMGDFENAVQCHEQHLKIAKDLGNKREEARAYSNLGSAYHYRRNFDKAMSYHNYVLELAQELMEKAIEMRAYAGLGHAARCMQDLERAKQYHEQQLGIAEDLKDRAAEGRASSNLGIIHQMKGDYDTALKLHKTHLCIAQELSDYAAQGRAYGNMGNAYNALGMYDQAVKYHRQELQISMEVNDRASQASTHGNLAVAYQALGAHDRALQHYQNHLNIARELRDIQSEARALSNLGNFHCSRGEYVQAAPYYEQYLRLAPDLQDMEGEGKVCHNLGYAHYCLGNYQEAVKYYEQDLALAKDLHDKLSQAKAYCNLGLAFKALLNFSKAEECQKYLLSLAQSLNNSQAKFRALGNLGDIFICKKDINGAIKFYEQQLGLAHQVKDRRLEASAYAALGTAYRMIQKYDKALGYHTQELEVYQELSDLPGECRAHGHLAAVYMALGKYTMAFKCYEEQLDLGQKLKDPSLEAQVYGNMGITKMNMNVMEEAIGYFEQQLAMLQQLSGNESVLDRGRAYGNLGDCYEALGDYEEAIKYYEQYLSVAQSLNRMQDQAKAYRGLGNGHRAMGSLQQALVCFEKRLVVAHELGEAFNKAQAYGELGSLHSQLGNYEQAISCLERQLNIARDMKDRALESDAACGLGGVYQQMGEYDTALQYHQLDLQIAEETNNPTCQGRAYGNLGLTYESLGTFERAVVYQEQHLSIAAQMNDLAAKTVSYSSLGRTHHALQNYSQAVMYLQEGLRLAEQLGRREDEAKIRHGLGLSLWASGNLEEAQHQLYRASALFETIRHEAQLSTDYKLSLFDLQTSSYQALQRVLVSLGHHDEALAVAERGRTRAFADLLVERQTGQQDSDPYSPVTIDQILEMVNGQRGLVLYYSLAAGYLYSWLLAPGAGIVKFHEHYLGENTVENSSDFQASSSVTLPTATGSALEQHIASVREALGVESHYSRACASSETESEAGDIMDQQFEEMNNKLNSVTDPTGFLRMVRRNNLFNRSCQSMTSLFSNTVSPTQDGTSSLPRRQSSFAKPPLRALYDLLIAPMEGGLMHSSGPVGRHRQLILVLEGELYLIPFALLKGSSSNEYLYERFGLLAVPSIRSLSVQSKSHLRKNPPTYSSSTSMAAVIGNPKLPSAVMDRWLWGPMPSAEEEAYMVSELLGCQPLVGSVATKERVMSALTQAECVHFATHISWKLSALVLTPSMDGNPASSKSSFGHPYTIPESLRVQDDASDGESISDCPPLQELLLTAADVLDLQLPVKLVVLGSSQESNSKVTADGVIALTRAFLAAGAQCVLVSLWPVPVAASKMFIHAFYSSLLNGLKASAALGEAMKVVQSSKAFSHPSNWAGFMLIGSDVKLNSPSSLIGQALTEILQHPERARDALRVLLHLVEKSLQRIQNGQRNAMYTSQQSVENKVGGIPGWQALLTAVGFRLDPPTSGLPAAVFFPTSDPGDRLQQCSSTLQSLLGLPNPALQALCKLITASETGEQLISRAVKNMVGMLHQVLVQLQAGEKEQDLASAPIQVSISVQLWRLPGCHEFLAALGFDLCEVGQEEVILKTGKQANRRTVHFALQSLLSLFDSTELPKRLSLDSSSSLESLASAQSVSNALPLGYQQPPFSPTGADSIASDAISVYSLSSIASSMSFVSKPEGGSEGGGPGGRQDHDRSKNAYLQRSTLPRSQLPPQTRPAGNKDEEEYEGFSIISNEPLATYQENRNTCFSPDHKQPQPGTAGGMRVSVSSKGSISTPNSPVKMTLIPSPNSPFQKVGKLASSDTGESDQSSTETDSTVKSQEESNPKLDPQELAQKILEETQSHLIAVERLQRSGGQVSKSNNPEDGVQAPSSTAVFRASETSAFSRPVLSHQKSQPSPVTVKPKPPARSSSLPKVSSGYSSPTTSEMSIKDSPSQHSGRPSPGCDSQTSQLDQPLFKLKYPSSPYSAHISKSPRNMSPSSGHQSPAGSAPSPALSYSSAGSARSSPADAPDIDKLKMAAIDEKVQAVHNLKMFWQSTPQHSTGPMKIFRGAPGTMTSKRDVLSLLNLSPRHNKKEEGVDKLELKELSLQQHDGAPPKAPPNGHWRTETTSLGSLPLPAGPPATAPARPLRLPSGNGYKFLSPGRFFPSSKC

SEQ ID NO: 37831 - protein, 52 aa, Homo sapiens
  REGION 1..52: note = ENSP00000385708
MEGQRQESHATLTLAQAHFNNGEYAEAEALYSAYIRRCACAASSDESPGRIF

SEQ ID NO: 37832 - protein, 151 aa, Homo sapiens
  REGION 1..151: note = ENSP00000333018
MEGQRQESHATLTLAQAHFNNGEYAEAEALYSAYIRRCACAASSDESPGSKCSPEDLATAYNNRGQIKYFRVDFYEAMDDYTSAIEVQPNFEVPYYNRGLILYRLGYFDDALEDFKKVLDLNPGFQDATLSLKQTILDKEEKQRRNVAKNY

SEQ ID NO: 37833 - protein, 86 aa, Homo sapiens
  REGION 1..86: note = ENSP00000412874
MDVSEGTTMSSSHSYLISSRQCWNHSDRLISKCSPEDLATAYNNRGQIKYFRVDFYEAMDDYTSAIEVQPNFEVPYYNRGLILYRL

SEQ ID NO: 37834 - protein, 112 aa, Homo sapiens
  REGION 1..112: note = ENSP00000399930
MNRLRNAKIYVERAVKQKKIFTIQGCYPVIRCLLRRRGWVEKKMVHRSGPTLLPPQKDLDSSAMGDSDTTEDEDEDEDEEFQPSQLFDFDDLLKFDDLDGTHALMSRMVQNE

SEQ ID NO: 37835 - protein, 140 aa, Homo sapiens
  REGION 1..140: note = ENSP00000399782
MNRLRNAKIYVERAVKQKKIFTIQGCYPVIRCLLRRRGWVEKKMVHRSGPTLLPPQKDLDSSAMGDSDTTEDEDEDEDEEFQPSQLFDFDDLLKFDDLDGTHALMSRMVQNEIPYFIWTTRRDVLDCRFLSKDQMINHYA

SEQ ID NO: 37836 - protein, 109 aa, Homo sapiens
  REGION 1..109: note = ENSP00000401686
MNRLRNAKIYVERAVKQKKIFTIQGCYPVIRCLLRRRGWVEKKMVHRSGPTLLPPQKDLDSSAMGDSDTTEDEDEDEDEEFQPSQLFDFDDLLKFDDLDGTHALMVGLC

SEQ ID NO: 37837 - protein, 151 aa, Homo sapiens
  REGION 1..151: note = ENSP00000414965
MNRLRNAKIYVERAVKKKIFTIQGCYPVIRCLLRRRGWVEKKMVHRSGPTLLPPQKDLDSSAMGDSDTTEDEDEDEDEEFQPSQLFDFDDLLKFDDLDGTHALMSRMVQNEIPYFIWTTRRDVLDCRFLSKDQMINHYARAGSFTTKVGLC

SEQ ID NO: 37838 - protein, 160 aa, Homo sapiens
  REGION 1..160: note = ENSP00000408128
MNRLRNAKIYVERAVKQKKIFTIQGCYPVIRCLLRRRGWVEKKMVHRSGPTLLPPQKDLDSSAMGDSDTTEDEDEDEDEEFQPSQLFDFDDLLKFDDLDGTHALMVGLCLNLRNLPWFDEVDANSFFPRCYCLGAEDDKKAFIEDFWLTAARNVLKLVVK

SEQ ID NO: 37839 - protein, 115 aa, Homo sapiens
  REGION 1..115: note = ENSP00000394481
MNRLRNAKIYVERAVKQKKIFTIQGCYPVIRCLLRRRGWVEKKMVHRSGPTLLPPQKDLDSSAMGDSDTTEDEDEDEDEEFQPSQLFDFDDLLKFDDLDGTHALMSRMVQNEIPY

SEQ ID NO: 37840 - protein, 122 aa, Homo sapiens
  REGION 1..122: note = ENSP00000400462
MNRLRNAKIYVERAVKQKKIFTIQGCYPVIRCLLRRRGWVEKKMVHRSGPTLLPPQKDLDSSAMGDSDTTEDEDEDEDEEFQPSQLFDFDDLLKFDDLDGTHALMSRMVQNEIPYFIWTTRR

SEQ ID NO: 37841 - protein, 148 aa, Homo sapiens
  REGION 1..148: note = ENSP00000402197
MNRLRNAKIYVERAVKQKKIFTIQGCYPVIRCLLRRRGWVEKKMVHRSGPTLLPPQKDLDSSAMGDSDTTEDEDEDEDEEFQPSQLFDFDDLLKFDDLDGTHALMSRMVQNEIPYFIWTTRRDVLDCRFLSKDQMINHYARAGSFTTK

SEQ ID NO: 37842 - protein, 203 aa, Homo sapiens
  REGION 1..203: note = ENSP00000395912
MNRLRNAKIYVERAVKQKKIFTIQGCYPVIRCLLRRRGWVEKKMVHRSGPTLLPPQKDLDSSAMGDSDTTEDEDEDEDEEFQPSQLFDFDDLLKFDDLDGTHALMSRMVQNEIPYFIWTTRRDVLDCRFLSKDQMINHYARAGSFTTKVGLCLNLRNLPWFDEVDANSFFPRCYCLGAEDDKKAFIETGFHCVSQDGLDLLTS

SEQ ID NO: 37843 - protein, 915 aa, Homo sapiens
  REGION 1..915: note = ENSP00000392549
MQGPDAPLLLSARELGPGRRGSASWYRQEGGAVCNWLRKPQPLEPRTSFPSARRSEFRPPRRLPWAGPASAQSEEGHAGGRCQAGSPAPARRLSGAFKTLVPGTHAQGASDTHPLGPPHTPVLDPSPQDGFPVLWRGSSKASHMNRLRNAKIYVERAVKQKKIFTIQGCYPVIRCLLRRRGWVEKKMVHRSGPTLLPPQKDLDSSAMGDSDTTEDEDEDEDEEFQPSQLFDFDDLLKFDDLDGTHALMVGLCLNLRNLPWFDEVDANSFFPRCYCLGAEDDKKAFIEDFWLTAARNVLKLVVKSEWKSYPIQAVEEEASGDKQPKKQEKNPVLVSPEFVDEALCACEEYLSNLAHMDIDKDLEAPLYLTPEGWSLFLQRYYQVVHEGAELRHLDTQVQRCEDILQQLQAVVPQIDMEGDRNIWIVKPGAKSRGRGIMCMDHLEEMLKLVNGNPVVMKDGKWVVQKYIERPLLIFGTKFDLRQWFLVTDWNPLTVWFYRDSYIRFSTQPFSLKNLDNSVHLCNNSIQKHLENSCHRHPLLPPDNMWSSQRFQAHLQEMGAPNAWSTIIVPGMKDAVIHALQTSQDTVQCRKASFELYGADFVFGEDFQPWLIEINASPTMAPSTAVTARLCAGVQADTLRVVIDRMLDRNCDTGAFELIYKQPAVEVPQYVGIRLLVEGFTIKKPMAMCHRRMGVRPAVPLLTQRGSGEARHHFPSLHTKAQLPSPHVLRHQGQVLRRQHSKLVGTKALSTTGKALRTLPTAKVFISLPPNLDFKVAPSILKPRKAPALLCLRGPQLEVPCCLCPLKSEQFLAPVGRSRPKANSRPDCDKPRAEACPMKRLSPLKPLPLVGTFQRRRGLGDMKLGKPLLRFPTALVLDPTPNKKKQVKYLGLDSIAVGGSRVDGARPCTPGSTARA

SEQ ID NO: 37844 - protein, 189 aa, Homo sapiens
  REGION 1..189: note = ENSP00000389904
MNRLRNAKIYVERAVKQKKIFTIQGCYPVIRCLLRRRGWVEKKMVHRSGPTLLPPQKDLDSSAMGDSDTTEDEDEDEDEEFQPSQLFDFDDLLKFDDLDGTHALMSRMVQNEIPYFIWTTRRDVLDCRFLSKDQMINHYARAGSFTTKVGLCLNLRNLPWFDEVDANSFFPRCYCLGAEDDKKAFIGKE

SEQ ID NO: 37845 - protein, 116 aa, Homo sapiens
  REGION 1..116: note = ENSP00000398996
MNRLRNAKIYVERAVKQKKIFTIQGCYPVIRCLLRRRGWVEKKMVHRSGPTLLPPQKDLDSSAMGDSDTTEDEDEDEDEEFQPSQLFDFDDLLKFDDLDGTHALMASCAWTTWRRC

SEQ ID NO: 37846 - protein, 161 aa, Homo sapiens
  REGION 1..161: note = ENSP00000412915
MNRLRNAKIYVERAVKQKKIFTIQGCYPVIRCLLRRRGWVEKKMVHRSGPTLLPPQKDLDSSAMGDSDTTEDEDEDEDEEFQPSQLFDFDDLLKFDDLDGTHALMVDANSFFPRCYCLGAEDDKKAFIEDFWLTAARNVLKLVVKSEWKSYPIQAVEEEAS

SEQ ID NO: 37847 - protein, 118 aa, Homo sapiens
  REGION 1..118: note = ENSP00000396606
  VARIANT 1: note = Any amino acid
XLRNAKIYVERAVKQKKIFTIQGCYPVIRCLLRRRGWVEKKMVHRSGPTLLPPQKDLDSSAMGDSDTTEDEDEDEDEEFQPSQLFDFDDLLKFDDLDGTHALMRRGRTQAPRHSGPAL

SEQ ID NO: 37848 - protein, 520 aa, Homo sapiens
  REGION 1..520: note = ENSP00000312148
  VARIANT 1: note = Any amino acid
XFDDLLKFDDLDGTHALMSRMVQNEIPYFIWTTRRDVLDCRFLSKDQMINHYARAGSFTTKVGLCLNLRNLPWFDEVDANSFFPRCYCLGAEDDKKAFIEDFWLTAARNVLKLVVKSEWKSYPIQAVEEEASGDKQPKKQEKNPVLVSPEFVDEALCACEEYLSNLAHMDIDKDLEAPLYLTPEGWSLFLQRYYQVVHEGAELRHLDTQVQRCEDILQQLQAVVPQIDMEGDRNIWIVKPGAKSRGRGIMCMDHLEEMLKLVNGNPVVMKDGKWVVQKYIERPLLIFGTKFDLRQWFLVTDWNPLTVWFYRDSYIRFSTQPFSLKNLDNSVHLCNNSIQKHLENSCHRHPLLPPDNMWSSQRFQAHLQEMGAPNAWSTIIVPGMKDAVIHALQTSQDTVQCRKASFELYGADFVFGEDFQPWLIEINASPTMAPSTAVTARLCAGVQADTLRVVIDRMLDRNCDTGAFELIYKQPVTTSPASTPRPSCLLPMYSDTRARSSDDSTASWWALRPCRPQARP

SEQ ID NO: 37849 - protein, 27 aa, Homo sapiens
  REGION 1..27: note = ENSP00000473440
LKFDDLDGTHALMRRGFTVLARMVSIS

SEQ ID NO: 37850 - protein, 70 aa, Homo sapiens
  REGION 1..70: note = ENSP00000473376
  VARIANT 1: note = Any amino acid
XKFDDLDGTHALMSRMVQNEIPYFIWTTRRDVLDCRFLSKDQMINHYARAGSFTTKRRGFTVLARMVSIS

SEQ ID NO: 37851 - protein, 193 aa, Homo sapiens
  REGION 1..193: note = ENSP00000399191
  VARIANT 1: note = Any amino acid
XKFDDLDGTHALMSRMVQNEIPYFIWTTRRDVLDCRFLSKDQMINHYARAGSFTTKVGLCLNLRNLPWFDEVDANSFFPRCYCLGAEDDKKAFIGDKQPKKQEKNPVLVSPEFVDEALCACEEYLSNLAHMDIDKDLEAPLYLTPEGWSLFLQRYYQVVHEGAELRHLDTQVQRCEDILQQLQAVVPQIDMEG

SEQ ID NO: 37852 - protein, 619 aa, Homo sapiens
  REGION 1..619: note = ENSP00000398097
SRMVQNEIPYFIWTTRRDVLDCRFLSKDQMINHYARAGSFTTKVGLCLNLRNLPWFDEVDANSFFPRCYCLGAEDDKKAFIEDFWLTAARNVLKLVVKSEWKSYPIQAVEEEASGDKQPKKQEKNPVLVSPEFVDEALCACEEYLSNLAHMDIDKDLEAPLYLTPEGWSLFLQRYYQVVHEGAELRHLDTQVQRCEDILQQLQAVVPQIDMEGDRNIWIVKPGAKSRGRGIMCMDHLEEMLKLVNGNPVVMKDGKWVVQKYIERPLLIFGTKFDLRQWFLVTDWNPLTVWFYRDSYIRFSTQPFSLKNLDNSVHLCNNSIQKHLENSCHRHPLLPPDNMWSSQRFQAHLQEMGAPNAWSTIIVPGMKDAVIHALQTSQDTVQCRKASFELYGADFVFGEDFQPWLIEINASPTMAPSTAVTARLCAGVQADTLRVVIDRMLDRNCDTGAFELIYKQPAVEVPQYVGIRLLVEGFTIKKPMAMCHRRMGVRPAVPLLTQRGSGEGKDSGTPTHSRGIRKFKEVAQGCTAQKGHSWDADPARHHFPSLHTKAQLPSPHVLRHQGQVLRRQHSKLVGTKALSTTGKALRTLPTAKVFISLPPNLDFKVAPSILKPRKVGLDL

SEQ ID NO: 37853 - protein, 352 aa, Homo sapiens
  REGION 1..352: note = ENSP00000373338
MDIDKDLEAPLYLTPEGWSLFLQRYYQVVHEGAELRHLDTQVQRCEDILQQLQAVVPQIDMEGDRNIWIVKPGAKSRGRGIMCMDHLEEMLKLVNGNPVVMKDGKWVVQKYIERPLLIFGTKFDLRQWFLVTDWNPLTVWFYRDSYIRFSTQPFSLKNLDNSVHLCNNSIQKHLENSCHRHPLLPPDNMWSSQRFQAHLQEMGAPNAWSTIIVPGMKDAVIHALQTSQDTVQCRKASFELYGADFVFGEDFQPWLIEINASPTMAPSTAVTARLCAGVQADTLRVVIDRMLDRNCDTGAFELIYKQPVTTSPASTPRPSCLLPMYSDTRARSSDDSTASWWALRPCRPQARP

SEQ ID NO: 37854 - protein, 108 aa, Homo sapiens
  REGION 1..108: note = ENSP00000430051
MDIDKDLEAPLYLTPEGWSLFLQRYYQVVHEGAELRHLDTQVQRCEDILQQLQAVVPQIDMEGDRNIWIVKPGAKSRGRGIMCMDHLEEMLKLVNGNPVVMKDGNPSP

SEQ ID NO: 37855 - protein, 326 aa, Homo sapiens
  REGION 1..326: note = ENSP00000409632
MDIDKDLEAPLYLTPEGWSLFLQRYYQVVHEGAELRHLDTQVQRCEDILQQLQAVVPQIDMEGDRNIWIVKPGAKSRGRGIMCMDHLEEMLKLVNGNPVVMKDGKWVVQKYIERPLLIFGTKFDLRQWFLVTDWNPLTVWFYRDSYIRFSTQPFSLKNLDNSVHLCNNSIQKHLENSCHRHPLLPPDNMWSSQRFQAHLQEMGAPNAWSTIIVPGMKDAVIHALQTSQDTVQCRKASFELYGADFVFGEDFQPWLIEINASPTMAPSTAVTARLCAGVQADTLRVVIDRMLDRNCDTGAFELIYKQGPAPNMQVSPERNAPLCPAP

SEQ ID NO: 37856 - protein, 352 aa, Homo sapiens; identical to SEQ ID NO: 37853
  REGION 1..352: note = ENSP00000409246

SEQ ID NO: 37857 - protein, 434 aa, Homo sapiens
  REGION 1..434: note = ENSP00000403874
MDIDKDLEAPLYLTPEGWSLFLQRYYQVVHEGAELRHLDTQVQRCEDILQQLQAVVPQIDMEGDRNIWIVKPGAKSRGRGIMCMDHLEEMLKLVNGNPVVMKDGKWVVQKYIERPLLIFGTKFDLRQWFLVTDWNPLTVWFYRDSYIRFSTQPFSLKNLDNSVHLCNNSIQKHLENSCHRHPLLPPDNMWSSQRFQAHLQEMGAPNAWSTIIVPGMKDAVIHALQTSQDTVQCRKASFELYGADFVFGEDFQPWLIEINASPTMAPSTAVTARLCAGVQADTLRVVIDRMLDRNCDTGAFELIYKQPAVEVPQYVGIRLLVEGFTIKKPMAMCHRRMGVRPAVPLLTQRGSGEARHHFPSLHTKAQLPSPHVLRHQGQVLRRQHSKLVGTKALSTTGKALRTLPTAKVFISLPPNLDFKVAPSILKPRKVGLDL

SEQ ID NO: 37858 - protein, 181 aa, Homo sapiens
  REGION 1..181: note = ENSP00000473314
  VARIANT 1: note = Any amino acid
XTVQCRKASFELYGADFVFGEDFQPWLIEINASPTMAPSTAVTARLCAGVQADTLRVVIDRMLDRNCDTGAFELIYKQAPALLCLRGPQLEVPCCLCPLKSEQFLAPVGRSRPKANSRPDCDKPRAEACPMKRLSPLKPLPLVGTFQRRRGLGDMKLGKPLLRFPTALVLDPTPNKKKQVK

SEQ ID NO: 37859 - protein, 1281 aa, Homo sapiens
  REGION 1..1281: note = ENSP00000450713
MPIVMARDLEETASSSEDEEVISQEDHPCIMWTGGCRRIPVLVFHADAILTKDNNIRVIGERYHLSYKIVRTDSRLVRSILTAHGFHEVHPSSTDYNLMWTGSHLKPFLLRTLSEAQKVNHFPRSYELTRKDRLYKNIIRMQHTHGFKAFHILPQTFLLPAEYAEFCNSYSKDRGPWIVKPVASSRGRGVYLINNPNQISLEENILVSRYINNPLLIDDFKFDVRLYVLVTSYDPLVIYLYEEGLARFATVRYDQGAKNIRNQFMHLTNYSVNKKSGDYVSCDDPEVEDYGNKWSMSAMLRYLKQEGRDTTALMAHVEDLIIKTIISAELAIATACKTFVPHRSSCFELYGFDVLIDSTLKPWLLEVNLSPSLACDAPLDLKIKASMISDMFTVVGFVCQDPAQRASTRPIYPTFESSRRNPFQKPQRPVSAQFQSSKAKQRCRPLSASDAEMKNLVGSAREKGPGKLGGSVLGLSMEEIKVLRRVKEENDRRGGFIRIFPTSETWEIYGSYLEHKTSMNYMLATRLFQDRMTADGAPELKIESLNSKAKLHAALYERKLLSLEVRKRRRRSSRLRAMRPKYPVITQPAEMNVKTETESEEEEEVALDNEDEEQEASQEESAGFLRENQAKYTPSLTALVENTPKENSMKVREWNNKGGHCCKLETQELEPKFNLMQILQDNGNLSKMQARIAFSAYLQHVQIRLMKDSGGQTFSASWAAKEDEQMELVVRFLKRASNNLQHSLRMVLPSRRLALLERRRILAHQLGDFIIVYNKETEQMAEKKSKKKVEEEEEDGVNMENFQEFIRQASEAELEEVLTFYTQKNKSASVFLGTHSKISKNNNNYSDSGAKGDHPETIMEEVKIKPPKQQQTTEIHSDKLSRFTTSAEKEAKLVYSNSSSGPTATLQKIPNTHLSSVTTSDLSPGPCHHSSLSQIPSAIPSMPHQPTILLNTVSASASPCLHPGAQNIPSPTGLPRCRSGSHTIGPFSSFQSAAHIYSQKLSRPSSAKAAGSCYLNKHHSGIAKTQKEGEDASLYSKRYNQSMVTAELQRLAEKQAARQYSPSSHINLLTQQVTNLNLATGIINRSSASAPPTLRPIISPSGPTWSTQSDPQAPENHSSSPGSRSLQTGGFAWEGEVENNVYSQATGVVPQHKYHPTAGSYQLQFALQQLEQQKLQSRQLLDQSRARHQAIFGSQTLPNSNLWTMNNGAGCRISSATASGQKPTTLPQKVVPPPSSCASLVPKPPPNHEQVLRRATSQKASNTRFRSSFQNYLWYFFQAVS

SEQ ID NO: 37860 - protein, 269 aa, Homo sapiens
  REGION 1..269: note = ENSP00000286650
MPIVMARDLEETASSSEDEEVISQEDHPCIMWTGGCRRIPVLVFHADAILTKDNNIRVIGERYHLSYKIVRTDSRLVRSILTAHGFHEVHPSSTDYNLMWTGSHLKPFLLRTLSEAQKVNHFPRSYELTRKDRLYKNIIRMQHTHGFKAFHILPQTFLLPAEYAEFCNSYSKDRGPWIVKPVASSRGRGVYLINNPNQISLEENILVSRYINNPLLIDDFKFDVRLYVLVTSYDPLVIYLYEEGLARKCNWKMGNTMDKRRLPIYVQVL

SEQ ID NO: 37861 - protein, 1281 aa, Homo sapiens
  REGION 1..1281: note = ENSP00000298832
MPIVMARDLEETASSSEDEEVISQEDHPCIMWTGGCRRIPVLVFHADAILTKDNNIRVIGERYHLSYKIVRTDSRLVRSILTAHGFHEVHPSSTDYNLMWTGSHLKPFLLRTLSEAQKVNHFPRSYELTRKDRLYKNIIRMQHTHGFKAFHILPQTFLLPAEYAEFCNSYSKDRGPWIVKPVASSRGRGVYLINNPNQISLEENILVSRYINNPLLIDDFKFDVRLYVLVTSYDPLVIYLYEEGLARFATVRYDQGAKNIRNQFMHLTNYSVNKKSGDYVSCDDPEVEDYGNKWSMSAMLRYLKQEGRDTTALMAHVEDLIIKTIISAELAIATACKTFVPHRSSCFELYGFDVLIDSTLKPWLLEVNLSPSLACDAPLDLKIKASMISDMFTVVGFVCQDPAQRASTRPIYPTFESSRRNPFQKPQRCRPLSASDAEMKNLVGSAREKGPGKLGGSVLGLSMEEIKVLRRVKEENDRRGGFIRIFPTSETWEIYGSYLEHKTSMNYMLATRLFQDRMTADGAPELKIESLNSKAKLHAALYERKLLSLEVRKRRRRSSRLRAMRPKYPVITQPAEMNVKTETESEEEEEVALDNEDEEQEASQEESAGFLRENQAKYTPSLTALVENTPKENSMKVREWNNKGGHCCKLETQELEPKFNLMQILQDNGNLSKMQARIAFSAYLQHVQIRLMKDSGGQTFSASWAAKEDEQMELVVRFLKRASNNLQHSLRMVLPSRRLALLERRRILAHQLGDFIIVYNKETEQMAEKKSKKKVEEEEEDGVNMENFQEFIRQASEAELEEVLTFYTQKNKSASVFLGTHSKISKNNNNYSDSGAKGDHPETIMEEVKIKPPKQQQTTEIHSDKLSRFTTSAEKEAKLVYSNSSSGPTATLQKIPNTHLSSVTTSDLSPGPCHHSSLSQIPSAIPSMPHQPTILLNTVSASASPCLHPGAQNIPSPTGLPRCRSGSHTIGPFSSFQSAAHIYSQKLSRPSSAKAGSCYLNKHHSGIAKTQKEGEDASLYSKRYNQSMVTAELQRLAEKQAARQYSPSSHINLLTQQVTNLNLATGIINRSSASAPPTLRPIISPSGPTWSTQSDPQAPENHSSSPGSRSLQTGGFAWEGEVENNVYSQATGVVPQHKYHPTAGSYQLQFALQQLEQQKLQSRQLLDQSRARHQAIFGSQTLPNSNLWTMNNGAGCRISSATASGQKPTTLPQKVVPPPSSCASLVPKPPPNHEQVLRRATSQKASKGSSAEGQLNGLQSSLNPAAFVPITSSTDPAHTKI

SEQ ID NO: 37862 - protein, 817 aa, Homo sapiens
  REGION 1..817: note = ENSP00000452524
MEEIKVLRRVKEENDRRGGFIRIFPTSETWEIYGSYLEHKTSMNYMLATRLFQDRGNPRRSLLTGRTRMTADGAPELKIESLNSKAKLHAALYERKLLSLEVRKRRRRSSRLRAMRPKYPVITQPAEMNVKTETESEEEEEVALDNEDEEQEASQEESAGFLRENQAKYTPSLTALVENTPKENSMKVREWNNKGGHCCKLETQELEPKFNLMQILQDNGNLSKMQARIAFSAYLQHVQIRLMKDSGGQTFSASWAAKEDEQMELVVRFLKRASNNLQHSLRMVLPSRRLALLERRRILAHQLGDFIIVYNKETEQMAEKKSKKKVEEEEEDGVNMENFQEFIRQASEAELEEVLTFYTQKNKSASVFLGTHSKISKNNNNYSDSGAKGDHPETIMEEVKIKPPKQQQTTEIHSDKLSRFTTSAEKEAKLVYSNSSSGPTATLQKIPNTHLSSVTTSDLSPGPCHHSSLSQIPSAIPSMPHQPTILLNTVSASASPCLHPGAQNIPSPTGLPRCRSGSHTIGPFSSFQSAAHIYSQKLSRPSSAKAGSCYLNKHHSGIAKTQKEGEDASLYSKRYNQSMVTAELQRLAEKQAARQYSPSSHINLLTQQVTNLNLATGIINRSSASAPPTLRPIISPSGPTWSTQSDPQAPENHSSSPGSRSLQTGGFAWEGEVENNVYSQATGVVPQHKYHPTAGSYQLQFALQQLEQQKLQSRQLLDQSRARHQAIFGSQTLPNSNLWTMNNGAGCRISSATASGQKPTTLPQKVVPPPSSCASLVPKPPPNHEQVLRRATSQKASNTRFRSSFQNYLWYFFQAVS

SEQ ID NO: 37863 - protein, 775 aa, Homo sapiens
  REGION 1..775: note = ENSP00000451946
MNYMLATRLFQDRGNPRRSLLTGRTRMTADGAPELKIESLNSKAKLHAALYERKLLSLEVRKRRRRSSRLRAMRPKYPVITQPAEMNVKTETESEEEEEVALDNEDEEQEASQEESAGFLRENQAKYTPSLTALVENTPKENSMKVREWNNKGGHCCKLETQELEPKFNLMQILQDNGNLSKMQARIAFSAYLQHVQIRLMKDSGGQTFSASWAAKEDEQMELVVRFLKRASNNLQHSLRMVLPSRRLALLERRRILAHQLGDFIIVYNKETEQMAEKKSKKKVEEEEEDGVNMENFQEFIRQASEAELEEVLTFYTQKNKSASVFLGTHSKISKNNNNYSDSGAKGDHPETIMEEVKIKPPKQQQTTEIHSDKLSRFTTSAEKEAKLVYSNSSSGPTATLQKIPNTHLSSVTTSDLSPGPCHHSSLSQIPSAIPSMPHQPTILLNTVSASASPCLHPGAQNIPSPTGLPRCRSGSHTIGPFSSFQSAAHIYSQKLSRPSSAKAGSCYLNKHHSGIAKTQKEGEDASLYSKRYNQSMVTAELQRLAEKQAARQYSPSSHINLLTQQVTNLNLATGIINRSSASAPPTLRPIISPSGPTWSTQSDPQAPENHSSSPGSRSLQTGGFAWEGEVENNVYSQATGVVPQHKYHPTAGSYQLQFALQQLEQQKLQSRQLLDQSRARHQAIFGSQTLPNSNLWTMNNGAGCRISSATASGQKPTTLPQKVVPPPSSCASLVPKPPPNHEQVLRRATSQKASNTRFRSSFQNYLWYFFQAVS

SEQ ID NO: 37864 - protein, 60 aa, Homo sapiens
  REGION 1..60: note = ENSP00000478640
NLLTQQVTNLNLATGIINRSSASAPPTLRPIISPSGPTWSTQSDPQAPENHSSSPGSSFI

SEQ ID NO: 37865 - protein, 124 aa, Homo sapiens
  REGION 1..124: note = ENSP00000451917
MPIVMARDLEETASSSEDEEVISQEDHPCIMWTGGCRRIPVLVFHADAILTKDNNIRVIGERYHLSYKIVRTDSRLVRSILTAHGFHEVHPSSTDYNLMWTGSHLKPFLLRTLSEAQKVNHFPR

SEQ ID NO: 37866 - protein, 278 aa, Homo sapiens
  REGION 1..278: note = ENSP00000260116
MAEARSQPSAGPQLNALPDHSPLLQPGLAALRRRAREAGVPLAPLPLTDSFLLRFLRARDFDLDLAWRLLKNYYKWRAECPEISADLHPRSIIGLLKAGYHGVLRSRDPTGSKVLIYRIAHWDPKVFTAYDVFRVSLITSELIVQEVETQRNGIKAIFDLEGWQFSHAFQITPSVAKKIAAVLTDSFPLKVRGIHLINEPVIFHAVFSMIKPFLTEKIKERIHMHGNNYKQSLLQHFPDILPLEYGGEEFSMEDICQEWTNFIMKSEDYLSSISESIQ

SEQ ID NO: 37867 - protein, 523 aa, Homo sapiens
  REGION 1..523: note = ENSP00000258796
MAGVSYAAPWWVSLLHRLPHFDLSWEATSSQFRPEDTDYQQALLLLGAAALACLALDLLFLLFYSFWLCCRRRKSEEHLDADCCCTAWCVIIATLVCSAGIAVGFYGNGETSDGIHRATYSLRHANRTVAGVQDRVWDTAVGLNHTAEPSLQTLERQLAGRPEPLRAVQRLQGLLETLLGYTAAIPFWRNTAVSLEVLAEQVDLYDWYRWLGYLGLLLLDVIICLLVLVGLIRSSKGILVGVCLLGVLALVISWGALGLELAVSVGSSDFCVDPDAYVTKMVEEYSVLSGDILQYYLACSPRAANPFQQKLSGSHKALVEMQDVVAELLRTVPWEQPATKDPLLRVQEVLNGTEVNLQHLTALVDCRSLHLDYVQALTGFCYDGVEGLIYLALFSFVTALMFSSIVCSVPHTWQQKRGPDEDGEEEAAPGPRQAHDSLYRVHMPSLYSCGSSYGSETSIPAAAHTVSNAPVTEYMSQNANFQNPRCENTPLIGRESPPPSYTSSMRAKYLATSQPRPDSSGSH

SEQ ID NO: 37868 - protein, 491 aa, Homo sapiens
  REGION 1..491: note = ENSP00000385316
MAGVSYAAPWWVSLLHRLPHFDLSWEATSSQFRPEDTDYQQALLLLGAAALACLALDLLFLLFYSFWLCCRRRKSEEHLDADCCCTAWCVIIATLVCSAGIAVGFYGNGETSDGIHRATYSLRHANRTVAGVQDRVWDTAVGLNHTAEPSLQTLERQLAGRPEPLRAVQRLQGLLETLLGYTAAIPFWRNTAVSLEVLAEQVDLYDWYRVCLLGVLALVISWGALGLELAVSVGSSDFCVDPDAYVTKMVEEYSVLSGDILQYYLACSPRAANPFQQKLSGSHKALVEMQDVVAELLRTVPWEQPATKDPLLRVQEVLNGTEVNLQHLTALVDCRSLHLDYVQALTGFCYDGVEGLIYLALFSFVTALMFSSIVCSVPHTWQQKRGPDEDGEEEAAPGPRQAHDSLYRVHMPSLYSCGSSYGSETSIPAAAHTVSNAPVTEYMSQNANFQNPRCENTPLIGRESPPPSYTSSMRAKYLATSQPRPDSSGSH

SEQ ID NO: 37869 - protein, 116 aa, Homo sapiens
  REGION 1..116: note = ENSP00000383227
MGPLPCSPLRNTFMVSKRGFSPPQAPNFPTRPENLRTTAGVGDPARTQALLLLGAAALACLALDLLFLLFYSFWLCCRRRKSEEHLDADCCCTAWCVIIATLVCSAGIAVGFYGNG

SEQ ID NO: 37870 - protein, 352 aa, Homo sapiens
  REGION 1..352: note = ENSP00000385015
MPSGVPGCWPQLPLKGPWRPTPRPRVPVPWRTPRFACRWLGYLGLLLLDVIICLLVLVGLIRSSKGILVGVCLLGVLALVISWGALGLELAVSVGSSDFCVDPDAYVTKMVEEYSVLSGDILQYYLACSPRAANPFQQKLSGSHKALVEMQDVVAELLRTVPWEQPATKDPLLRVQEVLNGTEVNLQHLTALVDCRSLHLDYVQALTGFCYDGVEGLIYLALFSFVTALMFSSIVCSVPHTWQQKRGPDEDGEEEAAPGPRQAHDSLYRVHMPSLYSCGSSYGSETSIPAAAHTVSNAPVTEYMSQNANFQNPRCENTPLIGRESPPPSYTSSMRAKYLATSQPRPDSSGSH

SEQ ID NO: 37871 - protein, 186 aa, Homo sapiens
  REGION 1..186: note = ENSP00000413757
DPLLRVQEVLNGTEVNLQHLTALVDCRSLHLDYVQALTGFCYDGVEGLIYLALFSFVTALMFSSIVCSVPHTWQQKRGPDEDGEEEAAPGPRQAHDSLYRVHMPSLYSCGSSYGSETSIPAAAHTVSNAPVTEYMSQNANFQNPRCENTPLIGRESPPPSRYLAALDSGSHAGWQFKPMDSARTLW

SEQ ID NO: 37872 - protein, 47 aa, Homo sapiens
  REGION 1..47: note = ENSP00000407624
MIDLEPTVVDEVRAGTYRQLFHPEQLITGKEDAANNYARGHYTVGKE

SEQ ID NO: 37873 - protein, 383 aa, Homo sapiens
  REGION 1..383: note = ENSP00000318575
MIDLEPTVVDEVRAGTYRQLFHPEQLITGKEDAANNYARGHYTVGKESIDLVLDRIRKLTDACSGLQGFLIFHSFGGGTGSGFTSLLMERLSLDYGKKSKLEFAIYPAPQVSTAVVEPYNSILTTHTTLEHSDCAFMVDNEAIYDICRRNLDIERPTYTNLNRLISQIVSSITASLRFDGALNVDLTEFQTNLVPYPRIHFPLVTYAPIISAEKAYHEQLSVAEITSSCFEPNSQMVKCDPRHGKYMACCMLYRGDVVPKDVNVAIAAIKTKRTIQFVDWCPTGFKVGINYQPPTVVPGGDLAKVQRAVCMLSNTTAIAEAWARLDHKFDLMYAKRAFVHWYVGEGMEEGEFSEAREDLAALEKDYEEVGTDSFEEENEGEEF

SEQ ID NO: 37874 - protein, 449 aa, Homo sapiens
  REGION 1..449: note = ENSP00000333326
MRECISVHVGQAGVQIGNACWELFCLEHGIQADGTFDAQASKINDDDSFTTFFSETGNGKHVPRAVMIDLEPTVVDEVRAGTYRQLFHPEQLITGKEDAANNYARGHYTVGKESIDLVLDRIRKLTDACSGLQGFLIFHSFGGGTGSGFTSLLMERLSLDYGKKSKLEFAIYPAPQVSTAVVEPYNSILTTHTTLEHSDCAFMVDNEAIYDICRRNLDIERPTYTNLNRLISQIVSSITASLRFDGALNVDLTEFQTNLVPYPRIHFPLVTYAPIISAEKAYHEQLSVAEITSSCFEPNSQMVKCDPRHGKYMACCMLYRGDVVPKDVNVAIAAIKTKRTIQFVDWCPTGFKVGINYQPPTVVPGGDLAKVQRAVCMLSNTTAIAEAWARLDHKFDLMYAKRAFVHWYVGEGMEEGEFSEAREDLAALEKDYEEVGTDSFEEENEGEEF

SEQ ID NO: 37875 - protein, 467 aa, Homo sapiens
  REGION 1..467: note = ENSP00000412646
MLWGCRAKACWGPRLSDLVASLSPQRECISVHVGQAGVQIGNACWELFCLEHGIQADGTFDAQASKINDDDSFTTFFSETGNGKHVPRAVMIDLEPTVVDEVRAGTYRQLFHPEQLITGKEDAANNYARGHYTVGKESIDLVLDRIRKLTDACSGLQGFLIFHSFGGGTGSGFTSLLMERLSLDYGKKSKLEFAIYPAPQVSTAVVEPYNSILTTHTTLEHSDCAFMVDNEAIYDICRRNLDIERPTYTNLNRLISQIVSSITASLRFDGALNVDLTEFQTNLVPYPRIHFPLVTYAPIISAEKAYHEQLSVAEITSSCFEPNSQMVKCDPRHGKYMACCMLYRGDVVPKDVNVAIAAIKTKRTIQFVDWCPTGFKVGINYQPPTVVPGGDLAKVQRAVCMLSNTTAIAEAWARLDHKFDLMYAKRAFVHWYVGEGMEEGEFSEAREDLAALEKDYEEVGTDSFEEE

SEQ ID NO: 37876 - protein, 275 aa, Homo sapiens
  REGION 1..275: note = ENSP00000477306
  VARIANT 1: note = Any amino acid
XFDGALNVDLTEFQTNLVPYPRIHFPLVTYAPIISAEKAYHEQLSVAEITSSCFEPNSQMVKCDPRHGKYMACCMLYRGDVVPKDVNVAIAAIKTKRTIQFVDWCPTGFKVGINYQPPTVVPGGDLAKVQRAVCMLSNTTAIAEAWARLDHKFDLMYAKRAFVHCQRIQLGISCSSMTSLVSASLEPFLKAVFDFHESFEDGRPADLQNAPRFGLARTRVLAKGFRLLTFDGNSTEVIPRWLHSVLWWHAIPVFPALMTFLYRIFTLITFFIVIM

SEQ ID NO: 37877 - protein, 445 aa, Homo sapiens [sequence omitted]

SEQ ID NO: 37878 - protein, 444 aa, Homo sapiens
  REGION 1..444: note = ENSP00000264071
MREIVHLQAGQCGNQIGAKFWEVISDEHGIDPTGTYHGDSDLQLERINVYYNEATGGNYVPRAVLVDLEPGTMDSVRSGPFGQIFRPDNFVFGQSGAGNNWAKGHYTEGAELVDAVLDVVRKEAESCDCLQGFQLTHSLGGGTGSGMGTLLISKIREEFPDRIMNTFSVVPSPKVSDTVVEPYNATLSVHQLVENTDETYCIDNEALYDICFRTLKLTTPTYGDLNHLVSATMSGVTTCLRFPGQLNADLRKLAVNMVPFPRLHFFMPGFAPLTSRGSQQYRALTVPELTQQMFDAKNMMAACDPRHGRYLTVAAVFRGRMSMKEVDEQMLSVQSKNSSYFVEWIPNNVKTAVCDIPPRGLKMAATFIGNSTAIQELFKRISEQFTAMFRRKAFLHWYTGEGMDEMEFTEAESNMNDLVSEYQQYQDATAEEGEFEEEAEEEVA

SEQ ID NO: 37879 - protein, 155 aa, Homo sapiens
  REGION 1..155: note = ENSP00000472481
MREIVHLQAGQCGNQIGAKFWEVISDEHGIDPTGTYHGDSDLQLERINVYYNEEFPDRIMNTFSVVPSPKVSDTVVEPYNATLSVHQLVENTDETYCIDNEALYDICFRTLKLTTPTYGDLNHLVSATMSGVTTCLRFPGQLNADLRKLAVNMVP

SEQ ID NO: 37880 - protein, 160 aa, Homo sapiens
  REGION 1..160: note = ENSP00000469936
MREIVHLQAGQCGNQIGAKFWEVISDEHGIDPTGTYHGDSDLQLERINVYYNEAESCDCLQGFQLTHSLGGGTGSGMGTLLISKIREEFPDRIMNTFSVVPSPKVSDTVVEPYNATLSVHQLVENTDETYCIDNEALYDICFRTLKLTTPTYGDLNHLVS

SEQ ID NO: 37881 - protein, 144 aa, Homo sapiens
  REGION 1..144: note = ENSP00000470983
MREIVHLQAGQCGNQIGAKFWEGAELVDAVLDVVRKEAESCDCLQGFQLTHSLGGGTGSGMGTLLISKIREEFPDRIMNTFSVVPSPKVSDTVVEPYNATLSVHQLVENTDETYCIDNEALYDICFRTLKLTTPTYGDLNHLVS

SEQ ID NO: 37882 - protein, 109 aa, Homo sapiens
  REGION 1..109: note = ENSP00000469560
MREIVHLQAGQCGNQIGAKFWEVISDEHGIDPTGTYHGDSDLQLERINVYYNEATGGNYVPRAVLVDLEPGTMDSVRSGPFGQIFRPDNFVFGESPSREPEAGKPPYSC

SEQ ID NO: 37883 - protein, 93 aa, Homo sapiens
  REGION 1..93: note = ENSP00000471320
MREIVHLQAHTMGTVTCNWRGSTCTTTRPQEEIMSPERCWWTWNPAPWTLSVLAPSVRSFGRTTSCLANPEPATTGQRGTTRRAQSWWTLSWT

SEQ ID NO: 37884 - protein, 104 aa, Homo sapiens
  REGION 1..104: note = ENSP00000472795
MREIVHLQAGQCGNQIGAKAHTMGTVTCNWRGSTCTTTRPQEEIMSPERCWWTWNPAPWTLSVLAPSVRSFGRTTSCLANPEPATTGQRGTTRRAQSWWTLSWT

SEQ ID NO: 37885 - protein, 74 aa, Homo sapiens
  REGION 1..74: note = ENSP00000471880
MDSVRSGPFGQIFRPDNFVFGQSGAGNNWAKGHYTEGAELVDAVLDVVRKEAESCDCLQGFQLTHSLGGGTGSG

SEQ ID NO: 37886 - protein, 167 aa, Homo sapiens
  REGION 1..167: note = ENSP00000472375
MRRGAADRETEGPCSAVSAASSTLAAAAAPRARATAAASTLSATAMREIVHLQAGQCGNQIGAKFWEVISDEHGIDPTGTYHGDSDLQLERINVYYNEATGGNYVPRAVLVDLEPGTMDSVRSGPFGQIFRPDNFVFGQSGAGNNWAKGHYTEGAELVDAVLDVVRK

SEQ ID NO: 37887 - protein, 110 aa, Homo sapiens
  REGION 1..110: note = ENSP00000468843
MREIVHLQAGQCGNQIGAKFWEVISDEHGIDPTGTYHGDSDLQLERINVYYNEATGGNYVPRAVLVDLEPGTMDSVRSGPFGQIFRPDNFVFVETGFHRVSQDGLDLLTS

SEQ ID NO: 37888 - protein, 103 aa, Homo sapiens
  REGION 1..103: note = ENSP00000471503
MREIVHLQAGQCGNQIGAKFWEVISDEHGIDPTGTYHGDSDLQLERINVYYNEATGGNYVPRAVLVDLEPGTMDSVRSGPFGQIFRPDNFVFDRVCLSCCHPG

SEQ ID NO: 37889 - protein, 107 aa, Homo sapiens
  REGION 1..107: note = ENSP00000469660
MREIVHLQAGQCGNQIGAKFWEVISDEHGIDPTGTYHGDSDLQLERINVYYNEATGGNYVPRAVLVDLEPGTMDSVRSGPFGQIFRPDNFVFGQSGAGNNWAKGHYT

SEQ ID NO: 37890 - protein, 157 aa, Homo sapiens
  REGION 1..157: note = ENSP00000470627
MRRGAADRETERLPGAQGPCSAVSAASSTLAAAAAPRARATAAASTLSATAMREIVHLQAGQCGNQIGAKFWEVISDEHGIDPTGTYHGDSDLQLERINVYYNEATGGNYVPRAVLVDLEPGTMDSVRSGPFGQIFRPDNFVFGQSGAGNNWAKGHY

SEQ ID NO: 37891 - protein, 170 aa, Homo sapiens
  REGION 1..170: note = ENSP00000444110
MMKMRQAKLDYQRLLLEKRQRKKRLEPFMVQPNPEARLRRAKPRASDEQTPLVNCHTPHSNVILHGIDGPAAVLKPDEVHAPSVSSSVVEEDAENTVDTASKPGLQERLQKHDISESVNFDEETDGISQSACLERPNSASSQNSTFSSFCQKTEDTGYRHFRFCYCRPTS

SEQ ID NO: 37892 - protein, 137 aa, Homo sapiens
  REGION 1..137: note = ENSP00000442631
MGTKFTVYDRGICPMKGRGLVGAAHTRQELAAISYETNVLGFKGPRKMSVIIPGMTLNHKQIPYQPQNNHDSLLSRWQNRTMENLVELHNKAPVWNSDTQSYVLNFRGRVTQASVKNFQIVHKNDPDYIVMQFGRVA

SEQ ID NO: 37893 - protein, 39 aa, Homo sapiens
  REGION 1..39: note = ENSP00000437899
MEASRCRLSPSGDSVFHEEMMKMRQAKLDYQVLMVQLLS

SEQ ID NO: 37894 - protein, 39 aa, Homo sapiens; identical to SEQ ID NO: 37893
  REGION 1..39: note = ENSP00000441599

SEQ ID NO: 37895 - protein, 442 aa, Homo sapiens
  REGION 1..442: note = ENSP00000410051
MEASRCRLSPSGDSVFHEEMMKMRQAKLDYQRLLLEKRQRKKRLEPFMVQPNPEARLRRAKPRASDEQTPLVNCHTPHSNVILHGIDGPAAVLKPDEVHAPSVSSSVVEEDAENTVDTASKPGLQERLQKHDISESVNFDEETDGISQSACLERPNSASSQNSTDTGTSGSATAAQPADNLLGDIDDLEDFVYSPAPQGVTVRCRIIRDKRGMDRGLFPTYYMYLEKEENQKIFLLAARKRKKSKTANYLISIDPVDLSREGESYVGKLRSNLMGTKFTVYDRGICPMKGRGLVGAAHTRQELAAISYETNVLGFKGPRKMSVIIPGMTLNHKQIPYQPQNNHDSLLSRWQNRTMENLVELHNKAPVWNSDTQSYVLNFRGRVTQASVKNFQIVHKNDPDYIVMQFGRVADDVFTLDYNYPLCAVQAFGIGLSSFDSKLACE

SEQ ID NO: 37896 - protein, 501 aa, Homo sapiens
  REGION 1..501: note = ENSP00000380321
MEASRCRLSPSGDSVFHEEMMKMRQAKLDYQRLLLEKRQRKKRLEPFMVQPNPEARLRRAKPRASDEQTPLVNCHTPHSNVILHGIDGPAAVLKPDEVHAPSVSSSVVEEDAENTVDTASKPGLQERLQKHDISESVNFDEETDGISQSACLERPNSASSQNSTDTGTSGSATAAQPADNLLGDIDDLEDFVYSPAPQGVTVRCRIIRDKRGMDRGLFPTYYMYLEKEENQKIFLLAARKRKKSKTANYLISIDPVDLSREGESYVGKLRSNLMGTKFTVYDRGICPMKGRGLVGAAHTRQELAAISYETNVLGFKGPRKMSVIIPGMTLNHKQIPYQPQNNHDSLLSRWQNRTMENLVELHNKAPVWNSDTQSYVLNFRGRVTQASVKNFQIVHKNDPDYIVMQFGRVADDVFTLDYNYPLCAVQAFGIGLSSFDKCIQTLRMQELCELHRQHHSAASLVHRTVCQRWVGHPWRLLPQTSLLWTDLSPPPVVPAPHQISM

SEQ ID NO: 37897 - protein, 133 aa, Homo sapiens
  REGION 1..133: note = ENSP00000441319
  VARIANT 1: note = Any amino acid
XIPGMTLNHKQIPYQPQNNHDSLLSRWQNRTMENLVELHNKAPVWNSDTQSYVLNFRGRVTQASVKNFQIVHKNDPDYIVMQFGRVADDVFTLDYNYPLCAVQAFGIGLSSFDTDWPAPILVKSGCDHICDQL

SEQ ID NO: 37898 - protein, 109 aa, Homo sapiens
  REGION 1..109: note = ENSP00000440364
  VARIANT 1: note = Any amino acid
XPYQPQNNHDSLLSRWQNRTMENLVELHNKAPVWNSDTQSYVLNFRGRVTQASVKNFQIVHKNDPDYIVMQFGRVADDVFTLDYNYPLCAVQAFGIGLSSFDRVPLTAI

SEQ ID NO: 37899 - protein, 48 aa, Homo sapiens
  REGION 1..48: note = ENSP00000489624
MVITSENDEDRGGQEKESKEESVLAMLGIIGTILNLIVIIFVYIYTTL

SEQ ID NO: 37900 - protein, 48 aa, Homo sapiens; identical to SEQ ID NO: 37899
  REGION 1..48: note = ENSP00000490254

SEQ ID NO: 37901 - protein, 347 aa, Homo sapiens
  REGION 1..347: note = ENSP00000371450
MGARGAPSRRRQAGRRLRYLPTGSFPFLLLLLLLCIQLGGGQKKKENLLAEKVEQLMEWSSRRSIFRMNGDKFRKFIKAPPRNYSMIVMFTALQPQRQCSVCRQANEEYQILANSWRYSSAFCNKLFFSMVDYDEGTDVFQQLNMNSAPTFMHFPPKGRPKRADTFDLQRIGFAAEQLAKWIADRTDVHIRVFRPPNYSGTIALALLVSLVGGLLYLRRNNLEFIYNKTGWAMVSLCIVFAMTSGQMWNHIRGPPYAHKNPHNGQVSYIHGSSQAQFVAESHIILVLNAAITMGMVLLNEAATSKGDVGKRRIICLVGLGLVVFFFSFLLSIFRSKYHGYPYSFLIK

SEQ ID NO: 37902 - protein, 276 aa, Homo sapiens
  REGION 1..276: note = ENSP00000420829
MGARGAPSRRRQAGRRLRYLPTGSFPFLLLLLLLCIQLGGGQKKKENLLAEKVEQLMEWSSRRSIFRMNGDKFRKFIKAPPRNYSMIVMFTALQPQRQCSVCRQANEEYQILANSWRYSSAFCNKLFFSMVDYDEGTDVFQQLNMNSAPTFMHFPPKGRPKRADTFDLQRIGFAAEQLAKWIADRTDVHIRVFRPPNYSGTIALALLVSLVGGLLYLRRNNLEFIYNKTGWAMVSLCIVFAMTSGQMWNHIRGPPYAHKNPHNGQVMPLSPWGWFF

SEQ ID NO: 37903 - protein, 314 aa, Homo sapiens
  REGION 1..314: note = ENSP00000425777
MGARGAPSRRRQAGRRLRYLPTGSFPFLLLLLLLCIQLGGGQKKKENLLAEKVEQLMEWSSRRSIFRMNGDKFRKFIKAPPRNYSMIVMFTALQPQRQCSVCRQANEEYQILANSWRYSSAFCNKLFFSMVDYDEGTDVFQQLNMNSAPTFMHFPPKGRPKRADTFDLQRIGFAAEQLAKWIADRTDVHIRVFRPPNYSGTIALALLVSLVGGLLYLRRNNLEFIYNKTGWAMVSLCIVFAMTSGQMWNHIRGPPYAHKNPHNGQVSYIHGSSQAQFVAESHIILVLNAAITMGMVLLNEAATSKGDVGKRRTF

SEQ ID NO: 37904 - protein, 276 aa, Homo sapiens; identical to SEQ ID NO: 37902
  REGION 1..276: note = ENSP00000426973

SEQ ID NO: 37905 - protein, 289 aa, Homo sapiens
  REGION 1..289: note = ENSP00000423426
MGARGAPSRRRQAGRRLRYLPTGSFPFLLLLLLLCIQLGGGQKKKENLLAEKVEQLMEWSSRRSIFRMNGDKFRKFIKAPPRNYSMIVMFTALQPQRQCSVCRQANEEYQILANSWRYSSAFCNKLFFSMVDYDEGTDVFQQLNMNSAPTFMHFPPKGRPKRADTFDLQRIGFAAEQLAKWIADRTDVHIRVFRPPNYSGTIALALLVSLVGGLLYLRRNNLEFIYNKTGWAMVSLCIVFAMTSGQMWNHIRGPPYAHKNPHNGQVSYIHGSSQAQFVAESHIILVLTS

SEQ ID NO: 37906 - protein, 348 aa, Homo sapiens
  REGION 1..348: note = ENSP00000424544
MGARGAPSRRRQAGRRLRYLPTGSFPFLLLLLLLCIQLGGGQKKKENLLAEKVEQLMEWSSRRSIFRMNGDKFRKFIKAPPRNYSMIVMFTALQPQRQCSVCRQANEEYQILANSWRYSSAFCNKLFFSMVDYDEGTDVFQQLNMNSAPTFMHFPPKGRPKRADTFDLQRIGFAAEQLAKWIADRTDVHIRVFRPPNYSGTIALALLVSLVGGLLYLRRNNLEFIYNKTGWAMVSLCIVFAMTSGQMWNHIRGPPYAHKNPHNGQVSYIHGSSQAQFVAESHIILVLNAAITMGMVLLNEAATSKGDVGKRRIICLVGLGLVVFFFSFLLSIFRSKYHGYPYSDLDFE

SEQ ID NO: 37907 - protein, 302 aa, Homo sapiens
  REGION 1..302: note = ENSP00000426880
NLLAEKVEQLMEWSSRRSIFRMNGDKFRKFIKAPPRNYSMIVMFTALQPQRQCSVCRQANEEYQILANSWRYSSAFCNKLFFSMVDYDEGTDVFQQLNMNSAPTFMHFPPKGRPKRADTFDLQRIGFAAEQLAKWIADRTDVHIRVFRPPNYSGTIALALLVSLVGGLLYLRRNNLEFIYNKTGWAMVSLCIVFAMTSGQMWNHIRGPPYAHKNPHNGQVSYIHGSSQAQFVAESHIILVLNAAITMGMVLLNEAATSKGDVGKRRIICLVGLGLVVFFFSFLLSIFRSKYHGYPYSDLDFE

SEQ ID NO: 37908 - protein, 338 aa, Homo sapiens
  REGION 1..338: note = ENSP00000222567
MAAGCSEAPRPAAASDGSLVGQAGVLPCLELPTYAAACALVNSRYSCLVAGPHQRHIALSPRYLNRKRTGIREQLDAELLRYSESLLGVPIAYDNIKVVGELGDIYDDQGHIHLNIEADFVIFCPEPGQKLMGIVNKVSSSHIGCLVHGCFNASIPKPEQLSAEQWQTMEINMGDELEFEVFRLDSDAAGVFCIRGKLNITSLQFKRSEVSEEVTENGTEEAAKKPKKKKKKKDPETYEVDSGTTKLADDADDTPMEESALQNTNNANGIWEEEPKKKKKKKKHQEVQDQDPVFQGSDSSGYQSDHKKKKKKRKHSEEAEFTPPLKCSPKRKGKSNFL

SEQ ID NO: 37909 - protein, 391 aa, Homo sapiens
  REGION 1..391: note = ENSP00000462521
MVMFKKIKSFEVVFNDPEKVYGSGEKVAGRVIVEVCEVTRVKAVRILACGVAKVLWMQGSQQCKQTSEYLRYEDTLLLEDQPTGENEMVIMRPGNKYEYKFGFELPQGPLGTSFKGKYGCVDYWVKAFLDRPSQPTQETKKNFEVVDLVDVNTPDLMAPVSAKKEKKVSCMFIPDGRVSVSARIDRKGFCEGDEISIHADFENTCSRIVVPKAAIVARHTYLANGQTKVLTQKLSSVRGNHIISGTCASWRGKSLRVQKIRPSILGCNILRVEYSLLIYVSVPGSKKVILDLPLVIGSRSGLSSRTSSMASRTSSEMSWVDLNIPDTPEAPPCYMDVIPEDHRLESPTTPLLDDMDGSQDSPIFMYAPEFKFMPPPTYTEVDPCILNNNVQ

SEQ ID NO: 37910 - protein, 336 aa, Homo sapiens
  REGION 1..336: note = ENSP00000396322
MPPKHSLSHRCILSVTASLMATRFSFPSGENEMVIMRPGNKYEYKFGFELPQGPLGTSFKGKYGCVDYWVKAFLDRPSQPTQETKKNFEVVDLVDVNTPDLMAPVSAKKEKKVSCMFIPDGRVSVSARIDRKGFCEGDEISIHADFENTCSRIVVPKAAIVARHTYLANGQTKVLTQKLSSVRGNHIISGTCASWRGKSLRVQKIRPSILGCNILRVEYSLLIYVSVPGSKKVILDLPLVIGSRSGLSSRTSSMASRTSSEMSWVDLNIPDTPEAPPCYMDVIPEDHRLESPTTPLLDDMDGSQDSPIFMYAPEFKFMPPPTYTEVDPCILNNNVQ

SEQ ID NO: 37911 - protein, 142 aa, Homo sapiens
  REGION 1..142: note = ENSP00000269601
MSYMLPHLHNGWQVDQAILSEEDRVVVIRFGHDWDPTCMKMDEVLYSIAEKVKNFAVIYLVDITEVPDFNKMYELYDPCTVMFFFRNKHIMIDLGTGNNNKINWAMEDKQEMVDIIETVYRGARKGRGLVVSPKDYSTKYRY

SEQ ID NO: 37912 - protein, 71 aa, Homo sapiens
  REGION 1..71: note = ENSP00000465572
MYELYDPCTVMFFFRNKHIMIDLGTGNNNKINWAMEDKQEMVDIIETVYRGARKGRGLVVSPKDYSTKYRY

SEQ ID NO: 37913 - protein, 57 aa, Homo sapiens
  REGION 1..57: note = ENSP00000465321
MSYMLPHLHNGWQVDQAILSEEDRVVVIRFGHDWDPTCMKMDEVLYSIAEKEQAHHD

SEQ ID NO: 37914 - protein, 71 aa, Homo sapiens; identical to SEQ ID NO: 37912
  REGION 1..71: note = ENSP00000465493

SEQ ID NO: 37915 - protein, 91 aa, Homo sapiens
  REGION 1..91: note = ENSP00000347678
MSYMLPHLHNGWQVDQAILSEEDRVVVIRFGHDWDPTCMKMDEVLYSIAEKVKNFAVIYLVDITEVPDFNKMYELYDPCTVMFFFSYHRGW

SEQ ID NO: 37916 - protein, 54 aa, Homo sapiens
  REGION 1..54: note = ENSP00000466266
MSYMLPHLHNGWQVDQAILSEEDRVVVIRFGHDWDPTCMKMDEVLYSIAEKVVA

SEQ ID NO: 37917 - protein, 71 aa, Homo sapiens; identical to SEQ ID NO: 37912
  REGION 1..71: note = ENSP00000468761

SEQ ID NO: 37918 - protein, 103 aa, Homo sapiens
  REGION 1..103: note = ENSP00000468493
MSYMLPHLHNGWQVDQAILSEEDRVVVIRFGHDWDPTCMKMDEVLYSIAEKVKNFAVIYLVDITEVPDFNKMYELYDPCTVMFFFRYVILKLLLKLNIVSLEA

SEQ ID NO: 37919 - protein, 54 aa, Homo sapiens; identical to SEQ ID NO: 37916
  REGION 1..54: note = ENSP00000467304

SEQ ID NO: 37920 - protein, 86 aa, Homo sapiens
  REGION 1..86: note = ENSP00000466694
MSYMLPHLHNGWQVDQAILSEEDRVVVIRFGHDWDPTCMKMDEVLYSIAEKFCRLYRKCGTGICFWGGLRTFQSWQKAKGNRHVAR

SEQ ID NO: 37921 - protein, 313 aa, Homo sapiens
  REGION 1..313: note = ENSP00000315644
MPVAGSELPRRPLPPAAQERDAEPRPPHGELQYLGQIQHILRCGVRKDDRTGTGTLSVFGMQARYSLRDEFPLLTTKRVFWKGVLEELLWFIKGSTNAKELSSKGVKIWDANGSRDFLDSLGFSTREEGDLGPVYGFQWRHFGAEYRDMESDYSGQGVDQLQRVIDTIKTNPDDRRIIMCAWNPRDLPLMALPPCHALCQFYVVNSELSCQLYQRSGDMGLGVPFNIASYALLTYMIAHITGLKPGDFIHTLGDAHIYLNHIEPLKIQLQREPRPFPKLRILRKVEKIDDFKAEDFQIEGYNPHPTIKMEMAV

SEQ ID NO: 37922 - protein, 230 aa, Homo sapiens
  REGION 1..230: note = ENSP00000314902
MPVAGSELPRRPLPPAAQERDAEPRPPHGELQYLGQIQHILRCGVRKDDRTGTGTLSVFGMQARYSLRDYSGQGVDQLQRVIDTIKTNPDDRRIIMCAWNPRDLPLMALPPCHALCQFYVVNSELSCQLYQRSGDMGLGVPFNIASYALLTYMIAHITGLKPGDFIHTLGDAHIYLNHIEPLKIQLQREPRPFPKLRILRKVEKIDDFKAEDFQIEGYNPHPTIKMEMAV

SEQ ID NO: 37923 - protein, 279 aa, Homo sapiens
  REGION 1..279: note = ENSP00000314727
MPVAGSELPRRPLPPAAQERDAEPRPPHGELQYLGQIQHILRCGVRKDDRTGTGTLSVFGMQARYSLRDEFPLLTTKRVFWKGVLEELLWFIKGSTNAKELSSKGVKIWDANGSRDFLDSLGFSTREEGDLGPVYGFQWRHFGAEYRDMESDLPLMALPPCHALCQFYVVNSELSCQLYQRSGDMGLGVPFNIASYALLTYMIAHITGLKPGDFIHTLGDAHIYLNHIEPLKIQLQREPRPFPKLRILRKVEKIDDFKAEDFQIEGYNPHPTIKMEMAV

SEQ ID NO: 37924 - protein, 167 aa, Homo sapiens
  REGION 1..167: note = ENSP00000418705
MQEHYDEFFEEVFTEMEEKYGEVEEMNVCDNLGDHLVGNVYVKFRREEDAEKAVIDLNNRWFNGQPIHAELSPVTDFREACCRQYEMGECTRGGFCNFMHLKPISRELRRELYGRRRKKHRSRSRSRERRSRSRDRGRGGGGGGGGGGGGRERDRRRSRDRERSGRF

SEQ ID NO: 37925 - protein, 75 aa, Homo sapiens
  REGION 1..75: note = ENSP00000420672
MAEYLASIFGTEKDKVNCSFYFKIGACRHGDRCSRLHNKPTFSQTILIQNIYRNPQNSAQTADGSHYHCPLEHLP

SEQ ID NO: 37926 - protein, 240 aa, Homo sapiens
  REGION 1..240: note = ENSP00000369629
MAEYLASIFGTEKDKVNCSFYFKIGACRHGDRCSRLHNKPTFSQTILIQNIYRNPQNSAQTADGSHCAVSDVEMQEHYDEFFEEVFTEMEEKYGEVEEMNVCDNLGDHLVGNVYVKFRREEDAEKAVIDLNNRWFNGQPIHAELSPVTDFREACCRQYEMGECTRGGFCNFMHLKPISRELRRELYGRRRKKHRSRSRSRERRSRSRDRGRGGGGGGGGGGGGRERDRRRSRDRERSGRF

SEQ ID NO: 37927 - protein, 240 aa, Homo sapiens
  REGION 1..240: note = ENSP00000291552
MAEYLASIFGTEKDKVNCSFYFKIGACRHGDRCSRLHNKPTFSQTIALLNIYRNPQNSSQSADGLRCAVSDVEMQEHYDEFFEEVFTEMEEKYGEVEEMNVCDNLGDHLVGNVYVKFRREEDAEKAVIDLNNRWFNGQPIHAELSPVTDFREACCRQYEMGECTRGGFCNFMHLKPISRELRRELYGRRRKKHRSRSRSRERRSRSRDRGRGGGGGGGGGGGGRERDRRRSRDRERSGRF

SEQ ID NO: 37928 - protein, 45 aa, Homo sapiens
  REGION 1..45: note = ENSP00000489632
MAEYLASIFGTEKDKVNCSFYFKIGACRHGDRCSRLHNKPTFSQH

SEQ ID NO: 37929 - protein, 167 aa, Homo sapiens; identical to SEQ ID NO: 37924
  REGION 1..167: note = ENSP00000381205

SEQ ID NO: 37930 - protein, 505 aa, Homo sapiens
  REGION 1..505: note = ENSP00000356903
MNINDLKLTLSKAGQEHLLRFWNELEEAQQVELYAELQAMNFEELNFFFQKAIEGFNQSSHQKNVDARMEPVPREVLGSATRDQDQLQAWESEGLFQISQNKVAVLLLAGGQGTRLGVAYPKGMYDVGLPSRKTLFQIQAERILKLQQVAEKYYGNKCIIPWYIMTSGRTMESTKEFFTKHKYFGLKKENVIFFQQGMLPAMSFDGKIILEEKNKVSMAPDGNGGLYRALAAQNIVEDMEQRGIWSIHVYCVDNILVKVADPRFIGFCIQKGADCGAKVVEKTNPTEPVGVVCRVDGVYQVVEYSEISLATAQKRSSDGRLLFNAGNIANHFFTVPFLRDVVNVYEPQLQHHVAQKKIPYVDTQGQLIKPDKPNGIKMEKFVFDIFQFAKKFVVYEVLREDEFSPLKNADSQNGKDNPTTARHALMSLHHCWVLNAGGHFIDENGSRLPAIPRLKDANDVPIQCEISPLISYAGEGLESYVADKEFHAPLIIDENGVHELVKNGI

SEQ ID NO: 37931 - protein, 522 aa, Homo sapiens
  REGION 1..522: note = ENSP00000356902
MNINDLKLTLSKAGQEHLLRFWNELEEAQQVELYAELQAMNFEELNFFFQKAIEGFNQSSHQKNVDARMEPVPREVLGSATRDQDQLQAWESEGLFQISQNKVAVLLLAGGQGTRLGVAYPKGMYDVGLPSRKTLFQIQAERILKLQQVAEKYYGNKCIIPWYIMTSGRTMESTKEFFTKHKYFGLKKENVIFFQQGMLPAMSFDGKIILEEKNKVSMAPDGNGGLYRALAAQNIVEDMEQRGIWSIHVYCVDNILVKVADPRFIGFCIQKGADCGAKVVEKTNPTEPVGVVCRVDGVYQVVEYSEISLATAQKRSSDGRLLFNAGNIANHFFTVPFLRDVVNVYEPQLQHHVAQKKIPYVDTQGQLIKPDKPNGIKMEKFVFDIFQFAKKFVVYEVLREDEFSPLKNADSQNGKDNPTTARHALMSLHHCWVLNAGGHFIDENGSRLPAIPRSATNGKSETITADVNHNLKDANDVPIQCEISPLISYAGEGLESYVADKEFHAPLIIDENGVHELVKNGI

SEQ ID NO: 37932 - protein, 521 aa, Homo sapiens
  REGION 1..521: note = ENSP00000356901
MNINDLKLTLSKAGQEHLLRFWNELEEAQQVELYAELQAMNFEELNFFFQKAIEGFNQSSHQKNVDARMEPVPREVLGSATRDQDQLQAWESEGLFQISQNKVAVLLLAGGQGTRLGVAYPKGMYDVGLPSRKTLFQIQAERILKLQQVAEKYYGNKCIIPWYIMTSGRTMESTKEFFTKHKYFGLKKENVIFFQQGMLPAMSFDGKIILEEKNKVSMAPDGNGGLYRALAAQNIVEDMEQRGIWSIHVYCVDNILVKVADPRFIGFCIQKGADCGAKVVEKTNPTEPVGVVCRVDGVYQVVEYSEISLATAQKRSSDGRLLFNAGNIANHFFTVPFLRDVVNVYEPQLQHHVAQKKIPYVDTQGQLIKPDKPNGIKMEKFVFDIFQFAKKFVVYEVLREDEFSPLKNADSQNGKDNPTTARHALMSLHHCWVLNAGGHFIDENGSRLPAIPRATNGKSETITADVNHNLKDANDVPIQCEISPLISYAGEGLESYVADKEFHAPLIIDENGVHELVKNGI

SEQ ID NO: 37933 - protein, 522 aa, Homo sapiens; identical to SEQ ID NO: 37931
  REGION 1..522: note = ENSP00000271469

SEQ ID NO: 37934 - protein, 649 aa, Homo sapiens
  REGION 1..649: note = ENSP00000284273
MAQYGHPSPLGMAAREELYSKVTPRRNRQQRPGTIKHGSALDVLLSMGFPRARAQKALASTGGRSVQAACDWLFSHVGDPFLDDPLPREYVLYLRPTGPLAQKLSDFWQQSKQICGKNKAHNIFPHITLCQFFMCEDSKVDALGEALQTTVSRWKCKFSAPLPLELYTSSNFIGLFVKEDSAEVLKKFAADFAAEAASKTEVHVEPHKKQLHVTLAYHFQASHLPTLEKLAQNIDVKLGCDWVATIFSRDIRFANHETLQVIYPYTPQNDDELELVPGDFIFMSPMEQTSTSEGWIYGTSLTTGCSGLLPENYITKADECSTWIFHGSYSILNTSSSNSLTFGDGVLERRPYEDQGLGETTPLTIICQPMQPLRVNSQPGPQKRCLFVCRHGERMDVVFGKYWLSQCFDAKGRYIRTNLNMPHSLPQRSGGFRDYEKDAPITVFGCMQARLVGEALLESNTIIDHVYCSPSLRCVQTAHNILKGLQQENHLKIRVEPGLFEWTKWVAGSTLPAWIPPSELAAANLSVDTTYRPHIPISKLVVSESYDTYISRSFQVTKEIISECKSKGNNILIVAHASSLEACTCQLQGLSPQNSKDFVQMVRKIPYLGFCSCEELGETGIWQLTDPPILPLTHGPTGGFNWRETLLQE

SEQ ID NO: 37935 - protein, 43 aa, Homo sapiens
  REGION 1..43: note = ENSP00000464594
MQIFVKTLTGKTITLEVEPSDTIENVKAKIQDKEGIPPDQQRL

SEQ ID NO: 37936 - protein, 229 aa, Homo sapiens
  REGION 1..229: note = ENSP00000304697
MQIFVKTLTGKTITLEVEPSDTIENVKAKIQDKEGIPPDQQRLIFAGKQLEDGRTLSDYNIQKESTLHLVLRLRGGMQIFVKTLTGKTITLEVEPSDTIENVKAKIQDKEGIPPDQQRLIFAGKQLEDGRTLSDYNIQKESTLHLVLRLRGGMQIFVKTLTGKTITLEVEPSDTIENVKAKIQDKEGIPPDQQRLIFAGKQLEDGRTLSDYNIQKESTLHLVLRLRGGC

SEQ ID NO: 37937 - protein, 206 aa, Homo sapiens
  REGION 1..206: note = ENSP00000463156
MQIFVKTLTGKTITLEVEPSDTIENVKAKIQDKEGIPPDQQRLIFAGKQLEDGRTLSDYNIQKESTLHLVLRLRGGMQIFVKTLTGKTITLEVEPSDTIENVKAKIQDKEGIPPDQQRLIFAGKQLEDGRTLSDYNIQKESTLHLVLRLRGGMQIFVKTLTGKTITLEVEPSDTIENVKAKIQDKEGIPPDQQRLIFAGKQLEDGR

SEQ ID NO: 37938 - protein, 153 aa, Homo sapiens
  REGION 1..153: note = ENSP00000437475
MQIFVKTLTGKTITLEVEPSDTIENVKAKIQDKEGIPPDQQRLIFAGKQLEDGRTLSDYNIQKESTLHLVLRLRGGMQIFVKTLTGKTITLEVEPSDTIENVKAKIQDKEGIPPDQQRLIFAGKQLEDGRTLSDYNIQKESTLHLVLRLRGGC

SEQ ID NO: 37939 - protein, 229 aa, Homo sapiens; identical to SEQ ID NO: 37936
  REGION 1..229: note = ENSP00000379180

SEQ ID NO: 37940 - protein, 229 aa, Homo sapiens; identical to SEQ ID NO: 37936
  REGION 1..229: note = ENSP00000379178

SEQ ID NO: 37941 - protein, 93 aa, Homo sapiens
  REGION 1..93: note = ENSP00000464510
MQIFVKTLTGKTITLEVEPSDTIENVKAKIQDKEGIPPDQQRLIFAGKQLEDGRTLSDYNIQKESTLHLVLRLRGGMQIFVKTLTGKTITLEV

SEQ ID NO: 37942 - protein, 229 aa, Homo sapiens; identical to SEQ ID NO: 37936
  REGION 1..229: note = ENSP00000478771

SEQ ID NO: 37943 - protein, 685 aa, Homo sapiens
  REGION 1..685: note = ENSP00000441543
MQIFVKTLTGKTITLEVEPSDTIENVKAKIQDKEGIPPDQQRLIFAGKQLEDGRTLSDYNIQKESTLHLVLRLRGGMQIFVKTLTGKTITLEVEPSDTIENVKAKIQDKEGIPPDQQRLIFAGKQLEDGRTLSDYNIQKESTLHLVLRLRGGMQIFVKTLTGKTITLEVEPSDTIENVKAKIQDKEGIPPDQQRLIFAGKQLEDGRTLSDYNIQKESTLHLVLRLRGGMQIFVKTLTGKTITLEVEPSDTIENVKAKIQDKEGIPPDQQRLIFAGKQLEDGRTLSDYNIQKESTLHLVLRLRGGMQIFVKTLTGKTITLEVEPSDTIENVKAKIQDKEGIPPDQQRLIFAGKQLEDGRTLSDYNIQKESTLHLVLRLRGGMQIFVKTLTGKTITLEVEPSDTIENVKAKIQDKEGIPPDQQRLIFAGKQLEDGRTLSDYNIQKESTLHLVLRLRGGMQIFVKTLTGKTITLEVEPSDTIENVKAKIQDKEGIPPDQQRLIFAGKQLEDGRTLSDYNIQKESTLHLVLRLRGGMQIFVKTLTGKTITLEVEPSDTIENVKAKIQDKEGIPPDQQRLIFAGKQLEDGRTLSDYNIQKESTLHLVLRLRGGMQIFVKTLTGKTITLEVEPSDTIENVKAKIQDKEGIPPDQQRLIFAGKQLEDGRTLSDYNIQKESTLHLVLRLRGGV

SEQ ID NO: 37944 - protein, 305 aa, Homo sapiens
  REGION 1..305: note = ENSP00000443053
MQIFVKTLTGKTITLEVEPSDTIENVKAKIQDKEGIPPDQQRLIFAGKQLEDGRTLSDYNIQKESTLHLVLRLRGGMQIFVKTLTGKTITLEVEPSDTIENVKAKIQDKEGIPPDQQRLIFAGKQLEDGRTLSDYNIQKESTLHLVLRLRGGMQIFVKTLTGKTITLEVEPSDTIENVKAKIQDKEGIPPDQQRLIFAGKQLEDGRTLSDYNIQKESTLHLVLRLRGGMQIFVKTLTGKTITLEVEPSDTIENVKAKIQDKEGIPPDQQRLIFAGKQLEDGRTLSDYNIQKESTLHLVLRLRGGV

SEQ ID NO: 37945 - protein, 685 aa, Homo sapiens; identical to SEQ ID NO: 37943
  REGION 1..685: note = ENSP00000344818

SEQ ID NO: 37946 - protein, 169 aa, Homo sapiens
  REGION 1..169: note = ENSP00000440205
MQIFVKTLTGKTITLEVEPSDTIENVKAKIQDKEGIPPDQQRLIFAGKQLEDGRTLSDYNIQKESTLHLVLRLRGGMQIFVKTLTGKTITLEVEPSDTIENVKAKIQDKEGIPPDQQRLIFAGKQLEDGRTLSDYNIQKESTLHLVLRLRGGMQIFVKTLTGKTITLEV

SEQ ID NO: 37947 - protein, 160 aa, Homo sapiens
  REGION 1..160: note = ENSP00000442800
MQIFVKTLTGKTITLEVEPSDTIENVKAKIQDKEGIPPDQQRLIFAGKQLEDGRTLSDYNIQKESTLHLVLRLRGGMQIFVKTLTGKTITLEVEPSDTIENVKAKIQDKEGIPPDQQRLIFAGKQLEDGRTLSDYNIQKESTLHLVLRLRGGMQIFVKTL

SEQ ID NO: 37948 - protein, 155 aa, Homo sapiens
  REGION 1..155: note = ENSP00000445337
MQIFVKTLTGKTITLEVEPSDTIENVKAKIQDKEGIPPDQQRLIFAGKQLEDGRTLSDYNIQKESTLHLVLRLRGGMQIFVKTLTGKTITLEVEPSDTIENVKAKIQDKEGIPPDQQRLIFAGKQLEDGRTLSDYNIQKESTLHLVLRLRGGMQI

SEQ ID NO: 37949 - protein, 149 aa, Homo sapiens
  REGION 1..149: note = ENSP00000439492
MQIFVKTLTGKTITLEVEPSDTIENVKAKIQDKEGIPPDQQRLIFAGKQLEDGRTLSDYNIQKESTLHLVLRLRGGMQIFVKTLTGKTITLEVEPSDTIENVKAKIQDKEGIPPDQQRLIFAGKQLEDGRTLSDYNIQKESTLHLVLRL

SEQ ID NO: 37950 - protein, 136 aa, Homo sapiens
  REGION 1..136: note = ENSP00000438289
MQIFVKTLTGKTITLEVEPSDTIENVKAKIQDKEGIPPDQQRLIFAGKQLEDGRTLSDYNIQKESTLHLVLRLRGGMQIFVKTLTGKTITLEVEPSDTIENVKAKIQDKEGIPPDQQRLIFAGKQLEDGRTLSDYN

SEQ ID NO: 37951 - protein, 134 aa, Homo sapiens
  REGION 1..134: note = ENSP00000441238
MQIFVKTLTGKTITLEVEPSDTIENVKAKIQDKEGIPPDQQRLIFAGKQLEDGRTLSDYNIQKESTLHLVLRLRGGMQIFVKTLTGKTITLEVEPSDTIENVKAKIQDKEGIPPDQQRLIFAGKQLEDGRTLSD

SEQ ID NO: 37952 - protein, 122 aa, Homo sapiens
  REGION 1..122: note = ENSP00000437452
MQIFVKTLTGKTITLEVEPSDTIENVKAKIQDKEGIPPDQQRLIFAGKQLEDGRTLSDYNIQKESTLHLVLRLRGGMQIFVKTLTGKTITLEVEPSDTIENVKAKIQDKEGIPPDQQRLIFA

SEQ ID NO: 37953 - protein, 61 aa, Homo sapiens
  REGION 1..61: note = ENSP00000441556
MQIFVKTLTGKTITLEVEPSDTIENVKAKIQDKEGIPPDQQRLIFAGKQLEDGRTLSDYNI

SEQ ID NO: 37954 - protein, 229 aa, Homo sapiens
  REGION 1..229: note = ENSP00000438394
MQIFVKTLTGKTITLEVEPSDTIENVKAKIQDKEGIPPDQQRLIFAGKQLEDGRTLSDYNIQKESTLHLVLRLRGGMQIFVKTLTGKTITLEVEPSDTIENVKAKIQDKEGIPPDQQRLIFAGKQLEDGRTLSDYNIQKESTLHLVLRLRGGMQIFVKTLTGKTITLEVEPSDTIENVKAKIQDKEGIPPDQQRLIFAGKQLEDGRTLSDYNIQKESTLHLVLRLRGGV

SEQ ID NO: 37955 - protein, 152 aa, Homo sapiens
  REGION 1..152: note = ENSP00000265339
MSTPARRRLMRDFKRLQEDPPVGVSGAPSENNIMQWNAVIFGPEGTPFEDGTFKLVIEFSEEYPNKPPTVRFLSKMFHPNVYADGSICLDILQNRWSPTYDVSSILTSIQSLLDEPNPNSPANSQAAQLYQENKREYEKRVSAIVEQSWNDS

SEQ ID NO: 37956 - protein, 44 aa, Homo sapiens
  REGION 1..44: note = ENSP00000425237
MSTPARRRLMRDFKRLQEDPPVGVSGAPSENNIMQWNAVIFGVC

SEQ ID NO: 37957 - protein, 138 aa, Homo sapiens
  REGION 1..138: note = ENSP00000426364
STPARRRLMRDFKRLQEDPPVGVSGAPSENNIMQWNAVIFGPEGTPFEDGTFKLVIEFSEEYPNKPPTVRFLSKMFHPNVYADGSICLDILQNRWSPTYDVSSILTSIQCLALLPRLECNGTILAHRNLCLPGSISAG

SEQ ID NO: 37958 - protein, 141 aa, Homo sapiens
  REGION 1..141: note = ENSP00000425137
  VARIANT 1: note = Any amino acid
XPARRRLMRDFKRLQEDPPVGVSGAPSENNIMQWNAVIFGPEGTPFEDGTFKLVIEFSEEYPNKPPTVRFLSKMFHPNDILQNRWSPTYDVSSILTSIQSLLDEPNPNSPANSQAAQLYQENKREYEKRVSAIVEQSWNDS

SEQ ID NO: 37959 - protein, 161 aa, Homo sapiens
  REGION 1..161: note = ENSP00000382713
MKELQDIARLSDRFISVELVDESLFDWNVKLHQVDKDSVLWQDMKETNTEFILLNLTFPDNFPFSPPFMRVLSPRLENGYVLDGGAICMELLTPRGWSSAYTVEAVMRQFAASLVKGQGRICRKAGKSKKSFSRKEAEATFKSLVKTHEKYGWVTPPVSDG

SEQ ID NO: 37960 - protein, 1066 aa, Homo sapiens
  REGION 1..1066: note = ENSP00000252108
MTDQENNNNISSNPFAALFGSLADAKQFAAIQKEQLKQQSDELPASPDDSDNSVSESLDEFDYSVAEISRSFRSQQEICEQLNINHMIQRIFLITLDNSDPSLKSGNGIPSRCVYLEEMAVELEDQDWLDMSNVEQALFARLLLQDPGNHLINMTSSTTLNLSADRDAGERHIFCYLYSCFQRAKEEITKVPENLLPFAVQCRNLTVSNTRTVLLTPEIYVDQNIHEQLVDLMLEAIQGAHFEDVTEFLEEVIEALILDEEVRTFPEVMIPVFDILLGRIKDLELCQILLYAYLDILLYFTRQKDMAKVFVEYIQPKDPTNGQMYQKTLLGVILSISCLLKTPGVVENHGYFLNPSRSSPQEIKVQEANIHQFMAQFHEKIYQMLKNLLQLSPETKHCILSWLGNCLHANAGRTKIWANQMPEIFFQMYASDAFFLNLGAALLKLCQPFCKPRSSRLLTFNPTYCALKELNDEERKIKNVHMRGLDKETCLIPAVQEPKFPQNYNLVTENLALTEYTLYLGFHRLHDQMVKINQNLHRLQVAWRDAQQSSSPAADNLREQFERLMTIYLSTKTAMTEPQMLQNCLNLQVSMAVLLVQLAIGNEGSQPIELTFPLPDGYSSLAYVPEFFADNLGDFLIFLRRFADDILETSADSLEHVLHFITIFTGSIERMKNPHLRAKLAEVLEAVMPHLDQTPNPLVSSVFHRKRVFCNFQYAPQLAEALIKVFVDIEFTGDPHQFEQKFNYRRPMYPILRYMWGTDTYRESIKDLADYASKNLEAMNPPLFLRFLNLLMNDAIFLLDEAIQYLSKIKIQQIEKDRGEWDSLTPEARREKEAGLQMFGQLARFHNIMSNETIGTLAFLTSEIKSLFVHPFLAERIISMLNYFLQHLVGPKMGALKVKDFSEFDFKPQQLVSDICTIYLNLGDEENFCATVPKDGRSYSPTLFAQTVRVLKKINKPGNMIMAFSNLAERIKSLADLQQQEEETYADACDEFLDPIMSTLMCDPVVLPSSRVTVDRSTIARHLLSDQTDPFNRSPLTMDQIRPNTELKEKIQRWLAERKQQKEQLE

SEQ ID NO: 37961 - protein, 1073 aa, Homo sapiens
  REGION 1..1073: note = ENSP00000387362
MTDQENNNNISSNPFAALFGSLADAKQFAAIQKEQLKQQSDELPASPDDSDNSVSESLDEFDYSVAEISRSFRSQQEICEQLNINHMIQRIFLITLDNSDPSLKSGNGIPSRCVYLEEMAVELEDQDWLDMSNVEQALFARLLLQDPGNHLINMTSSTTLNLSADRDAGERHIFCYLYSCFQRAKEEITKVPENLLPFAVQCRNLTVSNTRTVLLTPEIYVDQNIHEQLVDLMLEAIQGAREYMNKIYFEDVTEFLEEVIEALILDEEVRTFPEVMIPVFDILLGRIKDLELCQILLYAYLDILLYFTRQKDMAKVFVEYIQPKDPTNGQMYQKTLLGVILSISCLLKTPGVVENHGYFLNPSRSSPQEIKVQEANIHQFMAQFHEKIYQMLKNLLQLSPETKHCILSWLGNCLHANAGRTKIWANQMPEIFFQMYASDAFFLNLGAALLKLCQPFCKPRSSRLLTFNPTYCALKELNDEERKIKNVHMRGLDKETCLIPAVQEPKFPQNYNLVTENLALTEYTLYLGFHRLHDQMVKINQNLHRLQVAWRDAQQSSSPAADNLREQFERLMTIYLSTKTAMTEPQMLQNCLNLQVSMAVLLVQLAIGNEGSQPIELTFPLPDGYSSLAYVPEFFADNLGDFLIFLRRFADDILETSADSLEHVLHFITIFTGSIERMKNPHLRAKLAEVLEAVMPHLDQTPNPLVSSVFHRKRVFCNFQYAPQLAEALIKVFVDIEFTGDPHQFEQKFNYRRPMYPILRYMWGTDTYRESIKDLADYASKNLEAMNPPLFLRFLNLLMNDAIFLLDEAIQYLSKIKIQQIEKDRGEWDSLTPEARREKEAGLQMFGQLARFHNIMSNETIGTLAFLTSEIKSLFVHPFLAERIISMLNYFLQHLVGPKMGALKVKDFSEFDFKPQQLVSDICTIYLNLGDEENFCATVPKDGRSYSPTLFAQTVRVLKKINKPGNMIMAFSNLAERIKSLADLQQQEEETYADACDEFLDPIMSTLMCDPVVLPSSRVTVDRSTIARHLLSDQTDPFNRSPLTMDQIRPNTELKEKIQRWLAERKQQKEQLE

SEQ ID NO: 37962 - protein, 538 aa, Homo sapiens
  REGION 1..538: note = ENSP00000438918
MVKINQNLHRLQVAWRDAQQSSSPAADNLREQFERLMTIYLSTKTAMTEPQMLQNCLNLQVSMAVLLVQLAIGNEGSQPIELTFPLPDGYSSLAYVPEFFADNLGDFLIFLRRFADDILETSADSLEHVLHFITIFTGSIERMKNPHLRAKLAEVLEAVMPHLDQTPNPLVSSVFHRKRVFCNFQYAPQLAEALIKVFVDIEFTGDPHQFEQKFNYRRPMYPILRYMWGTDTYRESIKDLADYASKNLEAMNPPLFLRFLNLLMNDAIFLLDEAIQYLSKIKIQQIEKDRGEWDSLTPEARREKEAGLQMFGQLARFHNIMSNETIGTLAFLTSEIKSLFVHPFLAERIISMLNYFLQHLVGPKMGALKVKDFSEFDFKPQQLVSDICTIYLNLGDEENFCATVPKDGRSYSPTLFAQTVRVLKKINKPGNMIMAFSNLAERIKSLADLQQQEEETYADACDEFLDPIMSTLMCDPVVLPSSRVTVDRSTIARHLLSDQTDPFNRSPLTMDQIRPNTELKEKIQRWLAERKQQKEQLE

SEQ ID NO: 37963 - protein, 309 aa, Homo sapiens
  REGION 1..309: note = ENSP00000312029
MVGFKATDVPPTATVKFLGAGTAACIADLITFPLDTAKVRLQIQGESQGPVRATASAQYRGVMGTILTMVRTEGPRSLYNGLVAGLQRQMSFASVRIGLYDSVKQFYTKGSEHASIGSRLLAGSTTGALAVAVAQPTDVVKVRFQAQARAGGGRRYQSTVNAYKTIAREEGFRGLWKGTSPNVARNAIVNCAELVTYDLIKDALLKANLMTDDLPCHFTSAFGAGFCTTVIASPVDVVKTRYMNSALGQYSSAGHCALTMLQKEGPRAFYKGFMPSFLRLGSWNVVMFVTYEQLKRALMAACTSREAPF

SEQ ID NO: 37964 - protein, 225 aa, Homo sapiens
  REGION 1..225: note = ENSP00000441147
MVGFKATDVPPTATVKFLGAGTAACIADLITFPLDTAKVRLQIQGESQGPVRATASAQYRGVMGTILTMVRTEGPRSLYNGLVAGLQRQMSFASVRIGLYDSVKQFYTKGSEHASIGSRLLAGSTTGALAVAVAQPTDVVKVRFQAQARAGGGRRYQSTVNAYKTIAREEGFRGLWKGTSPNVARNAIVNCAELVTYDLIKDALLKANLMTGSCPPFSAWVPGTW

SEQ ID NO: 37965 - protein, 282 aa, Homo sapiens
  REGION 1..282: note = ENSP00000439951
GQHAYPCSYPVLALQIQGESQGPVRATASAQYRGVMGTILTMVRTEGPRSLYNGLVAGLQRQMSFASVRIGLYDSVKQFYTKGSEHASIGSRLLAGSTTGALAVAVAQPTDVVKVRFQAQARAGGGRRYQSTVNAYKTIAREEGFRGLWKGTSPNVARNAIVNCAELVTYDLIKDALLKANLMTDDLPCHFTSAFGAGFCTTVIASPVDVVKTRYMNSALGQYSSAGHCALTMLQKEGPRAFYKGFMPSFLRLGSWNVVMFVTYEQLKRALMAACTSREAPF

SEQ ID NO: 37966 - protein, 129 aa, Homo sapiens
  REGION 1..129: note = ENSP00000439706
GSRLLAGSTTGALAVAVAQPTDVVKVRFQAQARAGGGRRYQSTVNAYKTIAREEGFRGLWKGTSPNVARNAIVNCAELVTYDLIKDALLKANLMTGFCTTVIASPVDVVKTRYMNSALGQYSSAGHCAL

SEQ ID NO: 37967 - protein, 32 aa, Homo sapiens
  REGION 1..32: note = ENSP00000438230
MVGFKATDVPPTATVKFLGAGTAACIADLITF

SEQ ID NO: 37968 - protein, 794 aa, Homo sapiens
  REGION 1..794: note = ENSP00000358283
MADAWEEIRRLAADFQRAQFAEATQRLSERNCIEIVNKLIAQKQLEVVHTLDGKEYITPAQISKEMRDELHVRGGRVNIVDLQQVINVDLIHIENRIGDIIKSEKHVQLVLGQLIDENYLDRLAEEVNDKLQESGQVTISELCKTYDLPGNFLTQALTQRLGRIISGHIDLDNRGVIFTEAFVARHKARIRGLFSAITRPTAVNSLISKYGFQEQLLYSVLEELVNSGRLRGTVVGGRQDKAVFVPDIYSRTQSTWVDSFFRQNGYLEFDALSRLGIPDAVSYIKKRYKTTQLLFLKAACVGQGLVDQVEASVEEAISSGTWVDIAPLLPTSLSVEDAAILLQQVMRAFSKQASTVVFSDTVVVSEKFINDCTELFRELMHQKAEKEMKNNPVHLITEEDLKQISTLESVSTSKKDKKDERRRKATEGSGSMRGGGGGNAREYKIKKVKKKGRKDDDSDDESQSSHTGKKKPEISFMFQDEIEDFLRKHIQDAPEEFISELAEYLIKPLNKTYLEVVRSVFMSSTTSASGTGRKRTIKDLQEEVSNLYNNIRLFEKGMKFFADDTQAALTKHLLKSVCTDITNLIFNFLASDLMMAVDDPAAITSEIRKKILSKLSEETKVALTKLHNSLNEKSIEDFISCLDSAAEACDIMVKRGDKKRERQILFQHRQALAEQLKVTEDPALILHLTSVLLFQFSTHSMLHAPGRCVPQIIAFLNSKIPEDQHALLVKYQGLVVKQLVSQSKKTGQGDYPLNNELDKEQEDVASTTRKELQELSSSIKDLVLKSRKSSVTEE

SEQ ID NO: 37969 - protein, 87 aa, Homo sapiens
  REGION 1..87: note = ENSP00000423599
MVISESMDILFRIRGGLDLAFQLATPNEIFLKKALKHVLSDLSTKLSSNALVFRICHSSVYIWPSSDINTIPGELTDASAYLSQKKI

SEQ ID NO: 37970 - protein, 469 aa, Homo sapiens
  REGION 1..469: note = ENSP00000264689
MVISESMDILFRIRGGLDLAFQLATPNEIFLKKALKHVLSDLSTKLSSNALVFRICHSSVYIWPSSDINTIPGELTDASACKNILRFIQFEPEEDIKRKFMRKKDKKLSDMHQIVNIDLMLEMSTSLAAVTPIIERESGGHHYVNMTLPVDAVISVAPEETWGKVRKLLVDAIHNQLTDMEKCILKYMKGTSIVVPEPLHFLLPGKKNLVTISYPSGIPDGQLQAYRKELHDLFNLPHDRPYFKRSNAYHFPDEPYKDGYIRNPHTYLNPPNMETGMIYVVQGIYGYHHYMQDRIDDNGWGCAYRSLQTICSWFKHQGYTERSIPTHREIQQALVDAGDKPATFVGSRQWIGSIEVQLVLNQLIGITSKILFVSQGSEIASQGRELANHFQSEGTPVMIGGGVLAHTILGVAWNEITGQIKFLILDPHYTGAEDLQVILEKGWCGWKGPDFWNKDAYYNLCLPQRPNMI

SEQ ID NO: 37971 - protein, 387 aa, Homo sapiens
  REGION 1..387: note = ENSP00000421133
MVISESMDILFRIRGGLDLAFQLATPNEIFLKKALKHVLSDLSTKLSSNALVFRICHSSVYIWPSSDINTIPGELTDASACKNILRFIQFEPEEDIKRKFMRKKDKKLSDMHQIVNIDLMLEMSTSLAAVTPIIERESGGHHYVNMTLPVDAVISVAPEETWGKVRKLLVDAIHNQLTDMEKCILKYMKGTSIVVPEPLHFLLPGKKNLVTISYPSGIPDGQLQAYRKELHDLFNLPHDRPYFKRSNAYHFPDEPYKDGYIRNPHTYLNPPNMETGMIYVVQGIYGYHHYMQDRIDDNGWGCAYRSLQTICSWFKHQGYTERSIPTHREIQQALVDAGDKPATFVGSRQWIGSIEVQLVLNQLIGITSKILFVSNTRKNKKVGNIVS

SEQ ID NO: 37972 - protein, 368 aa, Homo sapiens
  REGION 1..368: note = ENSP00000425855
  VARIANT 1: note = Any amino acid
XFRFEPEEDIKRKFMRKKDKKLSDMHQIVNIDLMLEMSTSLAAVTPIIERESGGHHYVNMTLPVDAVISVAPEETWGKVRKLLVDAIHNQLTDMEKCILKYMKGTSIVVPEPLHFLLPGKKNLVTISYPSGIPDGQLQAYRKELHDLFNLPHDRPYFKRSNAYHFPDEPYKDGYIRNPHTYLNPPNMETGMDRIDDNGWGCAYRSLQTICSWFKHQGYTERSIPTHREIQQALVDAGDKPATFVGSRQWIGSIEVQLVLNQLIGITSKILFVSQGSEIASQGRELANHFQSEGTPVMIGGGVLAHTILGVAWNEITGQIKFLILDPHYTGAEDLQVILEKGWCGWKGPDFWNKDAYYNLCLPQRPNMI

SEQ ID NO: 37973 - protein, 197 aa, Homo sapiens
  REGION 1..197: note = ENSP00000423657
  VARIANT 1: note = Any amino acid
XMETGMIYVVQGIYGYHHYMQDRIDDNGWGCAYRSLQTICSWFKHQGYTERSIPTHREIQQALVDAGDKPATFVGSRQWIGSIEVQLVLNQLIGITSKILFVSQGSEIASQGRELANHFQSEGTPVMIGGGVLAHTILGVAWNEITGQIKFLILDPHYTGAEDLQVILEKHLEFEVYKRFFDWCMYLTEYSSNILVL

SEQ ID NO: 37974 - protein, 112 aa, Homo sapiens
  REGION 1..112: note = ENSP00000424419
MVISESMDILFRIRGGLDLAFQLATPNEIFLKKALKHVLSDLSTKLSSNALVFRICHSSVYIWPSSDINTIPGELTDASACKNILRFIQFEPEEDIKRKFMRKKDKKLSDML

SEQ ID NO: 37975 - protein, 124 aa, Homo sapiens
  REGION 1..124: note = ENSP00000423108
MDILFRIRGGLDLAFQLATPNEIFLKKALKHVLSDLSTKLSSNALVFRICHSSVYIWPSSDINTIPGELTDASACKNILRFIQFEPEEDIKRKFMRKKDKKLSDMHQIVNIDLMLEMSTSLAAV

SEQ ID NO: 37976 - protein, 1516 aa, Homo sapiens
  REGION 1..1516: note = ENSP00000365938
MAPAKATNVVRLLLGSTALWLSQLGSGTVAASKSVTAHLAAKWPETPLLLEASEFMAEESNEKFWQFLETVQELAIYKQTESDYSYYNLILKKAGQFLDNLHINLLKFAFSIRAYSPAIQMFQQIAADEPPPDGCNAFVVIHKKHTCKINEIKKLLKKAASRTRPYLFKGDHKFPTNKENLPVVILYAEMGTRTFSAFHKVLSEKAQNEEILYVLRHYIQKPSSRKMYLSGYGVELAIKSTEYKALDDTQVKTVTNTTVEDETETNEVQGFLFGKLKEIYSDLRDNLTAFQKYLIESNKQMMPLKVWELQDLSFQAASQIMSAPVYDSIKLMKDISQNFPIKARSLTRIAVNQHMREEIKENQKDLQVRFKIQPGDARLFINGLRVDMDVYDAFSILDMLKLEGKMMNGLRNLGINGEDMSKFLKLNSHIWEYTYVLDIRHSSIMWINDLENDDLYITWPTSCQKLLKPVFPGSVPSIRRNFHNLVLFIDPAQEYTLDFIKLADVFYSHEVPLRIGFVFILNTDDEVDGANDAGVALWRAFNYIAEEFDISEAFISIVHMYQKVKKDQNILTVDNVKSVLQNTFPHANIWDILGIHSKYDEERKAGASFYKMTGLGPLPQALYNGEPFKHEEMNIKELKMAVLQRMMDASVYLQREVFLGTLNDRTNAIDFLMDRNNVVPRINTLILRTNQQYLNLISTSVTADVEDFSTFFFLDSQDKSAVIAKNMYYLTQDDESIISAVTLWIIADFDKPSGRKLLFNALKHMKTSVHSRLGIIYNPTSKINEENTAISRGILAAFLTQKNMFLRSFLGQLAKEEIATAIYSGDKIKTFLIEGMDKNAFEKKYNTVGVNIFRTHQLFCQDVLKLRPGEMGIVSNGRFLGPLDEDFYAEDFYLLEKITFSNLGEKIKGIVENMGINANNMSDFIMKVDALMSSVPKRASRYDVTFLRENHSVIKTNPQENDMFFNVIAIVDPLTREAQKMAQLLVVLGKIINMKIKLFMNCRGRLSEAPLESFYRFVLEPELMSGANDVSSLGPVAKFLDIPESPLLILNMITPEGWLVETVHSNCDLDNIHLKDTEKTVTAEYELEYLLLEGQCFDKVTEQPPRGLQFTLGTKNKPAVVDTIVMAHHGYFQLKANPGAWILRLHQGKSEDIYQIVGHEGTDSQADLEDIIVVLNSFKSKILKVKVKKETDKIKEDILTDEDEKTKGLWDSIKSFTVSLHKENKKEKDVLNIFSVASGHLYERFLRIMMLSVLRNTKTPVKFWLLKNYLSPTFKEVIPHMAKEYGFRYELVQYRWPRWLRQQTERQRIIWGYKILFLDVLFPLAVDKIIFVDADQIVRHDLKELRDFDLDGAPYGYTPFCDSRREMDGYRFWKTGYWASHLLRRKYHISALYVVDLKKFRRIGAGDRLRSQYQALSQDPNSLSNLDQDLPNNMIYQVAIKSLPQDWLWCETWCDDESKQRAKTIDLCNNPKTKESKLKAAARIVPEWVEYDAEIRQLLDHLENKKQDTILTHDEL

SEQ ID NO: 37977 - protein, 280 aa, Homo sapiens
  REGION 1..280: note = ENSP00000365902
MAPAKATNVVRLLLGSTALWLSQLGSGTVAASKSVTAHLAAKWPETPLLLEASEFMAEESNEKFWQFLETVQELAIYKQTESDYSYYNLILKKAGQFLDNLHINLLKFAFSIRAYSPAIQMFQQIAADEPPPDGCNAFVVIHKKHTCKINEIKKLLKKAASRTRPYLFKGDHKFPTNKENLPVVILYAEMGTRTFSAFHKVLSEKAQNEEILYVLRHYIQKPSSRKMYLSGYGVELAIKSTEYKALDDTQVKTVTNTTVEDETETNEVQGFLFGKLKLVY

SEQ ID NO: 37978 - protein, 278 aa, Homo sapiens
  REGION 1..278: note = ENSP00000365904
MAPAKATNVVRLLLGSTALWLSQLGSGTVAASKSVTAHLAAKWPETPLLLEASEFMAEESNEKFWQFLETVQELAIYKQTESDYSYYNLILKKAGQFLDNLHINLLKFAFSIRAYSPAIQMFQQIAADEPPPDGCNAFVVIHKKHTCKINEIKKLLKKAASRTRPYLFKGDHKFPTNKENLPVVILYAEMGTRTFSAFHKVLSEKAQNEEILYVLRHYIQKPSSRKMYLSGYGVELAIKSTEYKALDDTQVKTVTNTTVEDETETNEVQGFLFGKLKS

SEQ ID NO: 37979 - protein, 278 aa, Homo sapiens; identical to SEQ ID NO: 37978
  REGION 1..278: note = ENSP00000482021

SEQ ID NO: 37980 - protein, 372 aa, Homo sapiens
  REGION 1..372: note = ENSP00000380743
MAPAKATNVVRLLLGSTALWLSQLGSGTVAASKSVTAHLAAKWPETPLLLEASEFMAEESNEKFWQFLETVQELAIYKQTESDYSYYNLILKKAGQFLDNLHINLLKFAFSIRAYSPAIQMFQQIAADEPPPDGCNAFVVIHKKHTCKINEIKKLLKKAASRTRPYLFKGDHKFPTNKENLPVVILYAEMGTRTFSAFHKVLSEKAQNEEILYVLRHYIQKPSSRKMYLSGYGVELAIKSTEYKALDDTQVKTVTNTTVEDETETNEVQGFLFGKLKEIYSDLRDNLTAFQKYLIESNKQMMPLKVWELQDLSFQAASQIMSAPVYDSIKLMKDISQNFPIKARLRMNILICLFQSTLNVKNLRSRHLYNKT

SEQ ID NO: 37981 - protein, 280 aa, Homo sapiens [sequence omitted]

SEQ ID NO: 37982 - protein, 541 aa, Homo sapiens
  REGION 1..541: note = ENSP00000311648
MKSYTPYFILLWSAVGIAKAAKIIIVPPIMFESHMYIFKTLASALHERGHHTVFLLSEGRDIAPSNHYSLQRYPGIFNSTTSDAFLQSKMRNIFSGRLTAIELFDILDHYTKNCDLMVGNHALIQGLKKEKFDLLLVDPNDMCGFVIAHLLGVKYAVFSTGLWYPAEVGAPAPLAYVPEFNSLLTDRMNLLQRMKNTGVYLISRLGVSFLVLPKYERIMQKYNLLPEKSMYDLVHGSSLWMLCTDVALEFPRPTLPNVVYVGGILTKPASPLPEDLQRWVNGANEHGFVLVSFGAGVKYLSEDIANKLAGALGRLPQKVIWRFSGPKPKNLGNNTKLIEWLPQNDLLGHSKIKAFLSHGGLNSIFETIYHGVPVVGIPLFGDHYDTMTRVQAKGMGILLEWKTVTEKELYEALVKVINNPSYRQRAQKLSEIHKDQPGHPVNRTIYWIDYIIRHNGAHHLRAAVHQISFCQYFLLDIAFVLLLGAALLYFLLSWVTKFIYRKIKSLWSRNKHSTVNGHYHNGILNGKYKRNGHIKHEKKVK

SEQ ID NO: 37983 - protein, 141 aa, Homo sapiens
  REGION 1..141: note = ENSP00000421446
MKSYTPYFILLWSAVGIAKAAKIIIVPPIMFESHMYIFKTLASALHERGHHTVFLLSEGRDIAPSNHYSLQRYPGIFNSTTSDAFLQSKMRNIFSGRLTAIELFDILDHYTKNCDLMVGNHALIQGLKKEKFDLLLVDPND

SEQ ID NO: 37984 - protein, 541 aa, Homo sapiens; identical to SEQ ID NO: 37982
  REGION 1..541: note = ENSP00000378019

SEQ ID NO: 37985 - protein, 2214 aa, Homo sapiens
  REGION 1..2214: note = ENSP00000260323
MVANFFKSLILPYIHKLCKGMFTKKLGNTNKNKEYRQQKKDQDFPTAGQTKSPKFSYTFKSTVKKIAKCSSTHNLSTEEDEASKEFSLSPTFSYRVAIANGLQKNAKVTNSDNEDLLQELSSIESSYSESLNELRSSTENQAQSTHTMPVRRNRKSSSSLAPSEGSSDGERTLHGLKLGALRKLRKWKKSQECVSSDSELSTMKKSWGIRSKSLDRTVRNPKTNALEPGFSSSGCISQTHDVMEMIFKELQGISQIETELSELRGHVNALKHSIDEISSSVEVVQSEIEQLRTGFVQSRRETRDIHDYIKHLGHMGSKASLRFLNVTEERFEYVESVVYQILIDKMGFSDAPNAIKIEFAQRIGHQRDCPNAKPRPILVYFETPQQRDSVLKKSYKLKGTGIGISTDILTHDIRERKEKGIPSSQTYESMAIKLSTPEPKIKKNNWQSPDDSDEDLESDLNRNSYAVLSKSELLTKGSTSKPSSKSHSARSKNKTANSSRISNKSDYDKISSQLPESDILEKQTTTHYADATPLWHSQSDFFTAKLSRSESDFSKLCQSYSEDFSENQFFTRTNGSSLLSSSDRELWQRKQEGTATLYDSPKDQHLNGGVQGIQGQTETENTETVDSGMSNGMVCASGDRSHYSDSQLSLHEDLSPWKEWNQGADLGLDSSTQEGFDYETNSLFDQQLDVYNKDLEYLGKCHSDLQDDSESYDLTQDDNSSPCPGLDNEPQGQWVGQYDSYQGANSNELYQNQNQLSMMYRSQSELQSDDSEDAPPKSWHSRLSIDLSDKTFSFPKFGSTLQRAKSALEVVWNKSTQSLSGYEDSGSSLMGRFRTLSQSTANESSTTLDSDVYTEPYYYKAEDEEDYTEPVADNETDYVEVMEQVLAKLENRTSITETDEQMQAYDHLSYETPYETPQDEGYDGPADDMVSEEGLEPLNETSAEMEIREDENQNIPEQPVEITKPKRIRPSFKEAALRAYKKQMAELEEKILAGDSSSVDEKARIVSGNDLDASKFSALQVCGGAGGGLYGIDSMPDLRRKKTLPIVRDVAMTLAARKSGLSLAMVIRTSLNNEELKMHVFKKTLQALIYPMSSTIPHNFEVWTATTPTYCYECEGLLWGIARQGMKCLECGVKCHEKCQDLLNADCLQRAAEKSSKHGAEDKTQTIITAMKERMKIREKNRPEVFEVIQEMFQISKEDFVQFTKAAKQSVLDGTSKWSAKITITVVSAQGLQAKDKTGSSDPYVTVQVGKNKRRTKTIFGNLNPVWDEKFYFECHNSTDRIKVRVWDEDDDIKSRVKQHFKKESDDFLGQTIVEVRTLSGEMDVWYNLEKRTDKSAVSGAIRLKINVEIKGEEKVAPYHIQYTCLHENLFHYLTEVKSNGGVKIPEVKGDEAWKVFFDDASQEIVDEFAMRYGIESIYQAMTHFSCLSSKYMCPGVPAVMSTLLANINAFYAHTTVSTNIQVSASDRFAATNFGREKFIKLLDQLHNSLRIDLSKYRENFPASNTERLQDLKSTVDLLTSITFFRMKVLELQSPPKASMVVKDCVRACLDSTYKYIFDNCHELYSQLTDPSKKQDIPREDQGPTTKNLDFWPQLITLMVTIIDEDKTAYTPVLNQFPQELNMGKISAEIMWTLFALDMKYALEEHENQRLCKSTDYMNLHFKVKWFYNEYVRELPAFKDAVPEYSLWFEPFVMQWLDENEDVSMEFLHGALGRDKKDGFQQTSEHALFSCSVVDVFAQLNQSFEIIKKLECPNPEALSHLMRRFAKTINKVLLQYAAIVSSDFSSHCDKENVPCILMNNIQQLRVQLEKMFESMGGKELDSEASTILKELQVKLSGVLDELSVTYGESFQVIIEECIKQMSFELNQMRANGNTTSNKNSAAMDAEIVLRSLMDFLDKTLSLSAKICEKTVLKRVLKELWKLVLNKIEKQIVLPPLTDQTGPQMIFIAAKDLGQLSKLKEHMIREDARGLTPRQCAIMEVVLATIKQYFHAGGNGLKKNFLEKSPDLQSLRYALSLYTQTTDALIKKFIDTQTSQSRSSKDAVGQISVHVDITATPGTGDHKVTVKVIAINDLNWQTTAMFRPFVEVCILGPNLGDKKRKQGTKTKSNTWSPKYNETFQFILGKENRPGAYELHLSVKDYCFAREDRIIGMTVIQLQNIAEKGSYGAWYPLLKNISMDETGLTILRILSQRTSDDVAKEFVRLKSETRSTEESA

SEQ ID NO: 37986 - protein, 178 aa, Homo sapiens
  REGION 1..178: note = ENSP00000453018
  VARIANT 1: note = Any amino acid
XAKTINKVLLQYAAIVSSDFSSHCDKENVPCILMNNIQQLRVQLEKMFESMGGKEKKEGERFFYELDSEASTILKELQVKLSGVLDELSVTYGESFQVIIEECIKQMSFELNQMRANGNTTSNKNSAAMDAEIVLRSLMDFLDKTLSLSAKICEKTVLKRVLKELWKLVLNKIEKQIV

SEQ ID NO: 37987 - protein, 135 aa, Homo sapiens
  REGION 1..135: note = ENSP00000443886
MFRPFVEVCILGPNLGDKKRKQGTKTKSNTWSPKYNETFQFILGKENRPGAYELHLSVKDYCFAREDRIIGMTVIQLQNIAEKGSYGAWYPLLKNISMDETGLTILRILSQRTSDDVAKEFVRLKSETRSTEESA

SEQ ID NO: 37988 - protein, 20 aa, Homo sapiens
  REGION 1..20: note = ENSP00000456350
MFRPFVEVCILGPNLGDKKR

SEQ ID NO: 37989 - protein, 945 aa, Homo sapiens
  REGION 1..945: note = ENSP00000334329
MGARSGARGALLLALLLCWDPRLSQAGTDSGSEVLPDSFPSAPAEPLPYFLQEPQDAYIVKNKPVELRCRAFPATQIYFKCNGEWVSQNDHVTQEGLDEATGLRVREVQIEVSRQQVEELFGLEDYWCQCVAWSSAGTTKSRRAYVRIAYLRKNFDQEPLGKEVPLDHEVLLQCRPPEGVPVAEVEWLKNEDVIDPTQDTNFLLTIDHNLIIRQARLSDTANYTCVAKNIVAKRRSTTATVIVYVNGGWSSWAEWSPCSNRCGRGWQKRTRTCTNPAPLNGGAFCEGQAFQKTACTTICPVDGAWTEWSKWSACSTECAHWRSRECMAPPPQNGGRDCSGTLLDSKNCTDGLCMQNKKTLSDPNSHLLEASGDAALYAGLVVAIFVVVAILMAVGVVVYRRNCRDFDTDITDSSAALTGGFHPVNFKTARPSNPQLLHPSVPPDLTASAGIYRGPVYALQDSTDKIPMTNSPLLDPLPSLKVKVYSSSTTGSGPGLADGADLLGVLPPGTYPSDFARDTHFLHLRSASLGSQQLLGLPRDPGSSVSGTFGCLGGRLSIPGTGVSLLVPNGAIPQGKFYEMYLLINKAESTLPLSEGTQTVLSPSVTCGPTGLLLCRPVILTMPHCAEVSARDWIFQLKTQAHQGHWEEVVTLDEETLNTPCYCQLEPRACHILLDQLGTYVFTGESYSRSAVKRLQLAVFAPALCTSLEYSLRVYCLEDTPVALKEVLELERTLGGYLVEEPKPLMFKDSYHNLRLSLHDLPHAHWRSKLLAKYQEIPFYHIWSGSQKALHCTFTLERHSLASTELTCKICVRQVEGEGQIFQLHTTLAETPAGSLDTLCSAPGSTVTTQLGPYAFKIPLSIRQKICNSLDAPNSRGNDWRMLAQKLSMDRYLNYFATKASPTGVILDLWEALQQDDGDLNSLASALEEMGKSEMLVAVATDGDC

SEQ ID NO: 37990 - protein, 934 aa, Homo sapiens
  REGION 1..934: note = ENSP00000362288
MGARSGARGALLLALLLCWDPRLSQAGTDSGSEVLPDSFPSAPAEPLPYFLQEPQDAYIVKNKPVELRCRAFPATQIYFKCNGEWVSQNDHVTQEGLDEATGLRVREVQIEVSRQQVEELFGLEDYWCQCVAWSSAGTTKSRRAYVRIAYLRKNFDQEPLGKEVPLDHEVLLQCRPPEGVPVAEVEWLKNEDVIDPTQDTNFLLTIDHNLIIRQARLSDTANYTCVAKNIVAKRRSTTATVIVYVNGGWSSWAEWSPCSNRCGRGWQKRTRTCTNPAPLNGGAFCEGQAFQKTACTTICPVDGAWTEWSKWSACSTECAHWRSRECMAPPPQNGGRDCSGTLLDSKNCTDGLCMQMLEASGDAALYAGLVVAIFVVVAILMAVGVVVYRRNCRDFDTDITDSSAALTGGFHPVNFKTARPSNPQLLHPSVPPDLTASAGIYRGPVYALQDSTDKIPMTNSPLLDPLPSLKVKVYSSSTTGSGPGLADGADLLGVLPPGTYPSDFARDTHFLHLRSASLGSQQLLGLPRDPGSSVSGTFGCLGGRLSIPGTGVSLLVPNGAIPQGKFYEMYLLINKAESTLPLSEGTQTVLSPSVTCGPTGLLLCRPVILTMPHCAEVSARDWIFQLKTQAHQGHWEEVVTLDEETLNTPCYCQLEPRACHILLDQLGTYVFTGESYSRSAVKRLQLAVFAPALCTSLEYSLRVYCLEDTPVALKEVLELERTLGGYLVEEPKPLMFKDSYHNLRLSLHDLPHAHWRSKLLAKYQEIPFYHIWSGSQKALHCTFTLERHSLASTELTCKICVRQVEGEGQIFQLHTTLAETPAGSLDTLCSAPGSTVTTQLGPYAFKIPLSIRQKICNSLDAPNSRGNDWRMLAQKLSMDRYLNYFATKASPTGVILDLWEALQQDDGDLNSLASALEEMGKSEMLVAVATDGDC

SEQ ID NO: 37991 - protein, 953 aa, Homo sapiens
  REGION 1..953: note = ENSP00000385143
MGRAAATAGGGGGARRWLPWLGLCFWAAGTAAARGTDNGEALPESIPSAPGTLPHFIEEPDDAYIIKSNPIALRCKARPAMQIFFKCNGEWVHQNEHVSEETLDESSGLKVREVFINVTRQQVEDFHGPEDYWCQCVAWSHLGTSKSRKASVRIAYLRKNFEQDPQGREVPIEGMIVLHCRPPEGVPAAEVEWLKNEEPIDSEQDENIDTRADHNLIIRQARLSDSGNYTCMAANIVAKRRSLSATVVVYVNGGWSSWTEWSACNVRCGRGWQKRSRTCTNPAPLNGGAFCEGMSVQKITCTSLCPVDGSWEVWSEWSVCSPECEHLRIRECTAPPPRNGGKFCEGLSQESENCTDGLCILDKKPLHEIKPQSIENASDIALYSGLGAAVVAVAVLVIGVTLYRRSQSDYGVDVIDSSALTGGFQTFNFKTVRQGNSLLLNSAMQPDLTVSRTYSGPICLQDPLDKELMTESSLFNPLSDIKVKVQSSFMVSLGVSERAEYHGKNHSRTFPHGNNHSFSTMHPRNKMPYIQNLSSLPTRTELRTTGVFGHLGGRLVMPNTGVSLLIPHGAIPEENSWEIYMSINQGEPSLQSDGSEVLLSPEVTCGPPDMIVTTPFALTIPHCADVSSEHWNIHLKKRTQQGKWEEVMSVEDESTSCYCLLDPFACHVLLDSFGTYALTGEPITDCAVKQLKVAVFGCMSCNSLDYNLRVYCVDNTPCAFQEVVSDERHQGGQLLEEPKLLHFKGNTFSLQISVLDIPPFLWRIKPFTACQEVPFSRVWCSNRQPLHCAFSLERYTPTTTQLSCKICIRQLKGHEQILQVQTSILESERETITFFAQEDSTFPAQTGPKAFKIPYSIRQRICATFDTPNAKGKDWQMLAQKNSINRNLSYFATQSSPSAVILNLWEARHQHDGDLDSLACALEEIGRTHTKLSNISESQLDEADFNYSRQNGL

SEQ ID NO: 37992 - protein, 886 aa, Homo sapiens
  REGION 1..886: note = ENSP00000392739
MGRAAATAGGGGGARRWLPWLGLCFWAAGTAAARGTDNGEALPESIPSAPGTLPHFIEEPDDAYIIKSNPIALRCKARPAMQIFFKCNGEWVHQNEHVSEETLDESSGLKVREVFINVTRQQVEDFHGPEDYWCQCVAWSHLGTSKSRKASVRIAYLRKNFEQDPQGREVPIEGMIVLHCRPPEGVPAAEVEWLKNEEPIDSEQDENIDTRADHNLIIRQARLSDSGNYTCMAANIVAKRRSLSATVVVYVDGSWEVWSEWSVCSPECEHLRIRECTAPPPRNGGKFCEGLSQESENCTDGLCILGIENASDIALYSGLGAAVVAVAVLVIGVTLYRRSQSDYGVDVIDSSALTGGFQTFNFKTVRQGNSLLLNSAMQPDLTVSRTYSGPICLQDPLDKELMTESSLFNPLSDIKVKVQSSFMVSLGVSERAEYHGKNHSRTFPHGNNHSFSTMHPRNKMPYIQNLSSLPTRTELRTTGVFGHLGGRLVMPNTGVSLLIPHGAIPEENSWEIYMSINQGEPSLQSDGSEVLLSPEVTCGPPDMIVTTPFALTIPHCADVSSEHWNIHLKKRTQQGKWEEVMSVEDESTSCYCLLDPFACHVLLDSFGTYALTGEPITDCAVKQLKVAVFGCMSCNSLDYNLRVYCVDNTPCAFQEVVSDERHQGGQLLEEPKLLHFKGNTFSLQISVLDIPPFLWRIKPFTACQEVPFSRVWCSNRQPLHCAFSLERYTPTTTQLSCKICIRQLKGHEQILQVQTSILESERETITFFAQEDSTFPAQTGPKAFKIPYSIRQRICATFDTPNAKGKDWQMLAQKNSINRNLSYFATQSSPSAVILNLWEARHQHDGDLDSLACALEEIGRTHTKLSNISESQLDEADFNYSRQNGL

SEQ ID NO: 37993 - protein, 884 aa, Homo sapiens
  REGION 1..884: note = ENSP00000287272
MGRAAATAGGGGGARRWLPWLGLCFWAAGTAAARGTDNGEALPESIPSAPGTLPHFIEEPDDAYIIKSNPIALRCKARPAMQIFFKCNGEWVHQNEHVSEETLDESSGLKVREVFINVTRQQVEDFHGPEDYWCQCVAWSHLGTSKSRKASVRIAYLRKNFEQDPQGREVPIEGMIVLHCRPPEGVPAAEVEWLKNEEPIDSEQDENIDTRADHNLIIRQARLSDSGNYTCMAANIVAKRRSLSATVVVYVDGSWEVWSEWSVCSPECEHLRIRECTAPPPRNGGKFCEGLSQESENCTDGLCILDKKPLHEIKPQSIENASDIALYSGLGAAVVAVAVLVIGVTLYRRSQSDYGVDVIDSSALTGNSLLLNSAMQPDLTVSRTYSGPICLQDPLDKELMTESSLFNPLSDIKVKVQSSFMVSLGVSERAEYHGKNHSRTFPHGNNHSFSTMHPRNKMPYIQNLSSLPTRTELRTTGVFGHLGGRLVMPNTGVSLLIPHGAIPEENSWEIYMSINQGEPSLQSDGSEVLLSPEVTCGPPDMIVTTPFALTIPHCADVSSEHWNIHLKKRTQQGKWEEVMSVEDESTSCYCLLDPFACHVLLDSFGTYALTGEPITDCAVKQLKVAVFGCMSCNSLDYNLRVYCVDNTPCAFQEVVSDERHQGGQLLEEPKLLHFKGNTFSLQISVLDIPPFLWRIKPFTACQEVPFSRVWCSNRQPLHCAFSLERYTPTTTQLSCKICIRQLKGHEQILQVQTSILESERETITFFAQEDSTFPAQTGPKAFKIPYSIRQRICATFDTPNAKGKDWQMLAQKNSINRNLSYFATQSSPSAVILNLWEARHQHDGDLDSLACALEEIGRTHTKLSNISESQLDEADFNYSRQNGL

SEQ ID NO: 37994 - protein, 958 aa, Homo sapiens
  REGION 1..958: note = ENSP00000412652
MGRAAATAGGGGGARRWLPWLGLCFWAAGTAAARGTDNGEALPESIPSAPGTLPHFIEEPDDAYIIKSNPIALRCKARPAMQIFFKCNGEWVHQNEHVSEETLDESSGLKVREVFINVTRQQVEDFHGPEDYWCQCVAWSHLGTSKSRKASVRIAYLRKNFEQDPQGREVPIEGMIVLHCRPPEGVPAAEVEWLKNEEPIDSEQDENIDTRADHNLIIRQARLSDSGNYTCMAANIVAKRRSLSATVVVYVNGGWSSWTEWSACNVRCGRGWQKRSRTCTNPAPLNGGAFCEGMSVQKITCTSLCPVDGSWEVWSEWSVCSPECEHLRIRECTAPPPRNGGKFCEGLSQESENCTDGLCILDKKPLHEIKPQRWSRRGIENASDIALYSGLGAAVVAVAVLVIGVTLYRRSQSDYGVDVIDSSALTGGFQTFNFKTVRQGNSLLLNSAMQPDLTVSRTYSGPICLQDPLDKELMTESSLFNPLSDIKVKVQSSFMVSLGVSERAEYHGKNHSRTFPHGNNHSFSTMHPRNKMPYIQNLSSLPTRTELRTTGVFGHLGGRLVMPNTGVSLLIPHGAIPEENSWEIYMSINQGEPSLQSDGSEVLLSPEVTCGPPDMIVTTPFALTIPHCADVSSEHWNIHLKKRTQQGKWEEVMSVEDESTSCYCLLDPFACHVLLDSFGTYALTGEPITDCAVKQLKVAVFGCMSCNSLDYNLRVYCVDNTPCAFQEVVSDERHQGGQLLEEPKLLHFKGNTFSLQISVLDIPPFLWRIKPFTACQEVPFSRVWCSNRQPLHCAFSLERYTPTTTQLSCKICIRQLKGHEQILQVQTSILESERETITFFAQEDSTFPAQTGPKAFKIPYSIRQRICATFDTPNAKGKDWQMLAQKNSINRNLSYFATQSSPSAVILNLWEARHQHDGDLDSLACALEEIGRTHTKLSNISESQLDEADFNYSRQNGL

SEQ ID NO: 37995 - protein, 948 aa, Homo sapiens
  REGION 1..948: note = ENSP00000394303
MILVLVKALSDVCAGTSGFLLDFSSQTSPGTDNGEALPESIPSAPGTLPHFIEEPDDAYIIKSNPIALRCKARPAMQIFFKCNGEWVHQNEHVSEETLDESSGLKVREVFINVTRQQVEDFHGPEDYWCQCVAWSHLGTSKSRKASVRIAYLRKNFEQDPQGREVPIEGMIVLHCRPPEGVPAAEVEWLKNEEPIDSEQDENIDTRADHNLIIRQARLSDSGNYTCMAANIVAKRRSLSATVVVYVNGGWSSWTEWSACNVRCGRGWQKRSRTCTNPAPLNGGAFCEGMSVQKITCTSLCPVDGSWEVWSEWSVCSPECEHLRIRECTAPPPRNGGKFCEGLSQESENCTDGLCILDKKPLHEIKPQSIENASDIALYSGLGAAVVAVAVLVIGVTLYRRSQSDYGVDVIDSSALTGGFQTFNFKTVRQGNSLLLNSAMQPDLTVSRTYSGPICLQDPLDKELMTESSLFNPLSDIKVKVQSSFMVSLGVSERAEYHGKNHSRTFPHGNNHSFSTMHPRNKMPYIQNLSSLPTRTELRTTGVFGHLGGRLVMPNTGVSLLIPHGAIPEENSWEIYMSINQGEPSLQSDGSEVLLSPEVTCGPPDMIVTTPFALTIPHCADVSSEHWNIHLKKRTQQGKWEEVMSVEDESTSCYCLLDPFACHVLLDSFGTYALTGEPITDCAVKQLKVAVFGCMSCNSLDYNLRVYCVDNTPCAFQEVVSDERHQGGQLLEEPKLLHFKGNTFSLQISVLDIPPFLWRIKPFTACQEVPFSRVWCSNRQPLHCAFSLERYTPTTTQLSCKICIRQLKGHEQILQVQTSILESERETITFFAQEDSTFPAQTGPKAFKIPYSIRQRICATFDTPNAKGKDWQMLAQKNSINRNLSYFATQSSPSAVILNLWEARHQHDGDLDSLACALEEIGRTHTKLSNISESQLDEADFNYSRQNGL

SEQ ID NO: 37996 - protein, 529 aa, Homo sapiens
  REGION 1..529: note = ENSP00000397211
MELMIQEKSFGNSLLLNSAMQPDLTVSRTYSGPICLQDPLDKELMTESSLFNPLSDIKVKVQSSFMVSLGVSERAEYHGKNHSRTFPHGNNHSFSTMHPRNKMPYIQNLSSLPTRTELRTTGVFGHLGGRLVMPNTGVSLLIPHGAIPEENSWEIYMSINQGEPSLQSDGSEVLLSPEVTCGPPDMIVTTPFALTIPHCADVSSEHWNIHLKKRTQQGKWEEVMSVEDESTSCYCLLDPFACHVLLDSFGTYALTGEPITDCAVKQLKVAVFGCMSCNSLDYNLRVYCVDNTPCAFQEVVSDERHQGGQLLEEPKLLHFKGNTFSLQISVLDIPPFLWRIKPFTACQEVPFSRVWCSNRQPLHCAFSLERYTPTTTQLSCKICIRQLKGHEQILQVQTSILESERETITFFAQEDSTFPAQTGPKAFKIPYSIRQRICATFDTPNAKGKDWQMLAQKNSINRNLSYFATQSSPSAVILNLWEARHQHDGDLDSLACALEEIGRTHTKLSNISESQLDEADFNYSRQNGL

SEQ ID NO: 37997 - protein, 3234 aa, Homo sapiens
  REGION 1..3234: note = ENSP00000272845
MVKRKSSEGQEQDGGRGIPLPIQTFLWRQTSAFLRPKLGKQYEASCVSFERVLVENKLHGLSPALSEAIQSISRWELVQAALPHVLHCTATLLSNRNKLGHQDKLGVAETKLLHTLHWMLLEAPQDCNNERFGGTDRGSSWGGSSSAFIHQVENQGSPGQPCQSSSNDEEENNRRKIFQNSMATVELFVFLFAPLVHRIKESDLTFRLASGLVIWQPMWEHRQPGVSGFTALVKPIRNIITAKRSSPINSQSRTCESPNQDARHLEGLQVVCETFQSDSISPKATISGCHRGNSFDGSLSSQTSQERGPSHSRASLVIPPCQRSRYATYFDVAVLRCLLQPHWSEEGTQWSLMYYLQRLRHMLEEKPEKPPEPDIPLLPRPRSSSMVAAAPSLVNTHKTQDLTMKCNEEEKSLSSEAFSKVSLTNLRRSAVPDLSSDLGMNIFKKFKSRKEDRERKGSIPFHHTGKRRPRRMGVPFLLHEDHLDVSPTRSTFSFGSFSGLGEDRRGIEKGGWQTTILGKLTRRGSSDAATEMESLSARHSHSHHTLVSDLPDPSNSHGENTVKEVRSQISTITVATFNTTLASFNVGYADFFNEHMRKLCNQVPIPEMPHEPLACANLPRSLTDSCINYSYLEDTEHIDGTNNFVHKNGMLDLSVVLKAVYLVLNHDISSRICDVALNIVECLLQLGVVPCVEKNRKKSENKENETLEKRPSEGAFQFKGVSGSSTCGFGGPAVSGAGDGGGEEGGGGDGGGGGGDGGGGGGGGGGPYEKNDKNQEKDESTPVSNHRLALTMLIKIVKSLGCAYGCGEGHRGLSGDRLRHQAQNCLTKLYKLDKMQFRQTMRDYVNKDSLNNVVDFLHALLGFCMEPVTDNKAGFGNNFTTVDNKSTAQNVEGIIVSAMFKSLITRCASTTHELHSPENLGLYCDIRQLVQFIKEAHGNVFRRVALSALLDSAEKLAPGKKVEENEQESKPAGSKRSEAGSIVDKGQVSSAPEECRSFMSGRPSQTPEHDEQMQGANLGRKDFWRKMFKSQSAASDTSSQSEQDTSECTTAHSGTTSDRRARSRSRRISLRKKLKLPIGKRNWLKRSSLSGLADGVEDLLDISSVDRLSFIRQSSKVKFTSAVKLSEGGPGSGMENGRDEEENFFKRLGCHSFDDHLSPNQDGGKSKNVVNLGAIRQGMKRFQFLLNCCEPGTIPDASILAAALDLEAPVVARAALFLECARFVHRCNRGNWPEWMKGHHVNITKKGLSRGRSPIVGNKRNQKLQWNAAKLFYQWGDAIGVRLNELCHGESESPANLLGLIYDEETKRRLRKEDEEEDFLDDSTVNPSKCGCPFALKMAACQLLLEITTFLRETFSCLPRPRTEPLVDLESCRLRLDPELDRHRYERKISFAGVLDENEDSKDSLHSSSHTLKSDAGVEEKKEGSPWSASEPSIEPEGMSNAGAEENYHRNMSWLHVMILLCNQQSFICTHVDYCHPHCYLHHSRSCARLVRAIKLLYGDSVDSLRESSNISSVALRGKKQKECSDKSCLRTPSLKKRVSDANLEGKKDSGMLKYIRLQVMSLSPAPLSLLIKAAPILTEEMYGDIQPAAWELLLSMDEHMAGAAAAMFLLCAVKVPEAVSDMLMSEFHHPETVQRLNAVLKFHTLWRFRYQVWPRMEEGAQQIFKIPPPSINFTLPSPVLGMPSVPMFDPPWVPQCSGSVQDPINEDQSKSFSARAVSRSHQRAEHILKNLQQEEEKKRLGREASLITAIPITQEACYEPTCTPNSEPEEEVEEVTNLASRRLSVSPSCTSSTSHRNYSFRRGSVWSVRSAVSAEDEEHTTEHTPNHHVPQPPQAVFPACICAAVLPIVHLMEDGEVREDGVAVSAVAQQVLWNCLIEDPSTVLRHFLEKLTISNRQDELMYMLRKLLLNIGDFPAQTSHILFNYLVGLIMYFVRTPCEWGMDAISATLTFLWEVVGYVEGLFFKDLKQTMKKEQCEVKLLVTASMPGTKTLVVHGQNECDIPTQLPVHEDTQFEALLKECLEFFNIPESQSTHYFLMDKRWNLIHYNKTYVRDIYPFRRSVSPQLNLVHMHPEKGQELIQKQVFTRKLEEVGRVLFLISLTQKIPTAHKQSHVSMLQEDLLRLPSFPRSAIDAEFSLFSDPQAGKELFGLDTLQKSLWIQLLEEMFLGMPSEFPWGDEIMLFLNVFNGALILHPEDSALLRQYAATVINTAVHFNHLFSLSGYQWILPTMLQVYSDYESNPQLRQAIEFACHQFYILHRKPFVLQLFASVAPLLEFPDAANNGPSKGVSAQCLFDLLQSLEGETTDILDILELVKAEKPLKSLDFCYGNEDLTFSISEAIKLCVTVVAYAPESFRSLQMLMVLEALVPCYLQKLKRQTSQVETVPAAREEIAATAALATSLQALLYSVEVLTRPMTAPQMSRCDQGHKGTTTANHTMSSGVNTRYQEQGAKLHFIRENLHLLEEGQGIPREELDERIAREEFRRPRESLLNICTEFYKHCGPRLKILQNLAGEPRVIALELLDVKSHMRLAEIAHSLLKLAPYDTQTMESRGLRRYIMEMLPITDWTAEAVRPALILILKRLDRMFNKIHKMPTLRRQVEWEPASNLIEGVCLTLQRQPIISFLPHLRSLINVCVNLVMGVVGPSSVADGLPLLHLSPYLSPPLPFSTAVVRLVALQIQALKEDFPLSHVISPFTNQERREGMLLNLLIPFVLTVGSGSKDSPWLEQPEVQLLLQTVINVLLPPRIISTSRSKNFMLESSPAHCSTPGDAGKDLRREGLAESTSQAAYLALKVILVCFERQLGSQWYWLSLQVKEMALRKVGGLALWDFLDFIVRTRIPIFVLLRPFIQCKLLAQPAENHEELSARQHIADQLERRFIPRPLCKSSLIAEFNSELKILKEAVHSGSAYQGKTSISTVGTSTSAYRLSLATMSRSNTGTGTVWEQDSEPSQQASQDTLSRTDEEDEENDSISMPSVVSEQEAYLLSAIGRRRFSSHVSSMSVPQAEVGMLPSQRVASIQSEPGQQNLLVQQPLGRKRGLRQLRRPLLSRQKTQTEPRNRQGARLSTTRRSIQPKTKPSADQKRSVTFIEAQPEPAAAPTDALPATGQLQGCSPAPSRKPEAMDEPVLTSSPAIVVADLHSVSPKQSENFPTEEGEKEEDTEAQGATAHSPLSAQLSDPDDFTGLETSSLLQHGDTVLHISEENGMENPLLSSQFTFTPTELGKTDAVLDESHV

SEQ ID NO: 37998 - protein, 546 aa, Homo sapiens
  REGION 1..546: note = ENSP00000335576
IPREELDERIAREEFRRPRESLLNICTEFYKHCGPRLKILQNLAGEPRVIALELLDVKSHMRLAEIAHSLLKLAPYDTQTMESRGLRRYIMEMLPITDWTAEAVRPALILILKRLDRMFNKIHKMPTLRRQVEWEPASNLIEGVCLTLQRQPIISFLPHLRSLINVCVNLVMGVVGPSSVADGLPLLHLSPYLSPPLPFSTAVVRLVALQIQALKEDFPLSHVISPFTNQERREGMLLNLLIPFVLTVGSGSKDSPWLEQPEVQLLLQTVINVLLPPRIISTSRSKNFMLESSPAHCSTPGDAGKDLRREGLAESTSQAAYLALKVILVCFERQLGSQWYWLSLQVKEMALRKVGGLALWDFLDFIVRTRIPIFVLLRPFIQCKLLAQPAENHEELSARQHIADQLERRFIPRPLCKSSLIAEFNSELKILKEAVHSGSAYQGKTSISTVGTSTSAYRLSLATMSRSNTGTGTVWEQDSEPSQQASQDTLSRTDEEDEENDSISMPSVVSEQEAYLLSAIGRRRFSSHVSSMSVPQAEVGMLPSQR

SEQ ID NO: 37999 - protein, 3258 aa, Homo sapiens
  REGION 1..3258: note = ENSP00000391088
MVKRKSSEGQEQDGGRGIPLPIQTFLWRQTSAFLRPKLGKQYEASCVSFERVLVENKLHGLSPALSEAIQSISRWELVQAALPHVLHCTATLLSNRNKLGHQDKLGVAETKLLHTLHWMLLEAPQDCNNERFGGTDRGSSWGGSSSAFIHQVENQGSPGQPCQSSSNDEEENNRRKIFQNSMATVELFVFLFAPLVHRIKESDLTFRLASGLVIWQPMWEHRQPGVSGFTALVKPIRNIITAKRSSPINSQSRTCESPNQDARHLEGLQVVCETFQSDSISPKATISGCHRGNSFDGSLSSQTSQERGPSHSRASLVIPPCQRSRYATYFDVAVLRCLLQPHWSEEGTQWSLMYYLQRLRHMLEEKPEKPPEPDIPLLPRPRSSSMVAAAPSLVNTHKTQDLTMKCNEEEKSLSSEAFSKVSLTNLRRSAVPDLSSDLGMNIFKKFKSRKEDRERKGSIPFHHTGKRRPRRMGVPFLLHEDHLDVSPTRSTFSFGSFSGLGEDRRGIEKGGWQTTILGKLTRRGSSDAATEMESLSARHSHSHHTLVSDLPDPSNSHGENTVKEVRSQISTITVATFNTTLASFNVGYADFFNEHMRKLCNQVPIPEMPHEPLACANLPRSLTDSCINYSYLEDTEHIDGTNNFVHKNGMLDLSVVLKAVYLVLNHDISSRICDVALNIVECLLQLGVVPCVEKNRKKSENKENETLEKRPSEGAFQFKGVSGSSTCGFGGPAVSGAGDGGGEEGGGGDGGGGGGDGGGGGGGGGGPYEKNDKNQEKDESTPVSNHRLALTMLIKIVKSLGCAYGCGEGHRGLSGDRLRHQVFRENAQNCLTKLYKLDKMQFRQTMRDYVNKDSLNNVVDFLHALLGFCMEPVTDNKAGFGNNFTTVDNKSTAQNVEGIIVSAMFKSLITRCASTTHELHSPENLGLYCDIRQLVQFIKEAHGNVFRRVALSALLDSAEKLAPGKKVEENEQESKPAGSKRSEAGSIVDKGQVSSAPEECRSFMSGRPSQTPEHDEQMQGANLGRKDFWRKMFKSQSAASDTSSQSEQDTSECTTAHSGTTSDRRARSRSRRISLRKKLKLPIGKRNWLKRSSLSGLADGVEDLLDISSVDRLSFIRQSSKVKFTSAVKLSEGGPGSGMENGRDEEENFFKRLGCHSFDDHLSPNQDGGKSKNVVNLGAIRQGMKRFQFLLNCCEPGTIPDASILAAALDLEAPVVARAALFLECARFVHRCNRGNWPEWMKGHHVNITKKGLSRGRSPIVGNKRNQKLQWNAAKLFYQWGDAIGVRLNELCHGESESPANLLGLIYDEETKRRLRKEDEEEDFLDDSTVNPSKCGCPFALKMAACQLLLEITTFLRETFSCLPRPRTEPLVDLESCRLRLDPELDRHRYERKISFAGVLDENEDSKDSLHSSSHTLKSDAGVEEKKEGSPWSASEPSIEPEGMSNAGAEENYHRNMSWLHVMILLCNQQSFICTHVDYCHPHCYLHHSRSCARLVRAIKLLYGDSVDSLRESSNISSVALRGKKQKECSDKSCLRTPSLKKRVSDANLEGKKDSGMLKYIRLQVMSLSPAPLSLLIKAAPILTEEMYGDIQPAAWELLLSMDEHMAGAAAAMFLLCAVKVPEAVSDMLMSEFHHPETVQRLNAVLKFHTLWRFRYQVWPRMEEGAQQIFKIPPPSINFTLPSPVLGMPSVPMFDPPWVPQCSGSVQDPINEDQSKSFSARAVSRSHQRAEHILKNLQQEEEKKRLGREASLITAIPITQEACYEPTCTPNSEPEEEVEEVTNLASRRLSVSPSCTSSTSHRNYSFRRGSVWSVRSAVSAEDEEHTTEHTPNHHVPQPPQAVFPACICAAVLPIVHLMEDGEVREDGVAVSAVAQQVLWNCLIEDPSTVLRHFLEKLTISNRQDELMYMLRKLLLNIGDFPAQTSHILFNYLVGLIMYFVRTPCEWGMDAISATLTFLWEVVGYVEGLFFKDLKQTMKKEQCEVKLLVTASMPGTKTLVVHGQNECDIPTQLPVHEDTQFEALLKECLEFFNIPESQSTHYFLMDKRWNLIHYNKTYVRDIYPFRRSVSPQLNLVHMHPEKGQELIQKQVFTRKLEEVGRVLFLISLTQKIPTAHKQSHVSMLQEDLLRLPSFPRSAIDAEFSLFSDPQAGKELFGLDTLQKSLWIQLLEEMFLGMPSEFPWGDEIMLFLNVFNGALILHPEDSALLRQYAATVINTAVHFNHLFSLSGYQWILPTMLQVYSDYESNPQLRQAIEFACHQFYILHRKPFVLQLFASVAPLLEFPDAANNGPSKGVSAQCLFDLLQSLEGETTDILDILELVKAEKPLKSLDFCYGNEDLTFSISEAIKLCVTVVAYAPESFRSLQMLMVLEALVPCYLQKLKRQTSQVETVPAAREEIAATAALATSLQALLYSVEVLTRPMTAPQMSRCDQGHKGTTTANHTMSSGVNTRYQEQGAKLHFIRENLHLLEEGQGIPREELDERIAREEFRRPRESLLNICTEFYKHCGPRLKILQNLAGEPRVIALELLDVKSHMRLAEIAHSLLKLAPYDTQTMESRGLRRYIMEMLPITDWTAEAVRPALILILKRLDRMFNKIHKMPTLRRQVEWEPASNLIEGVCLTLQRQPIISFLPHLRSLINVCVNLVMGVVGPSSVADGLPLLHLSPYLSPPLPFSTAVVRLVALQIQALKEDFPLSHVISPFTNQERREGMLLNLLIPFVLTVGSGSKDSPWLEQPEVQLLLQTVINVLLPPRIISTSRSKNFMLESSPAHCSTPGDAGKDLRREGLAESTSQAAYLALKVILVCFERQLGSQWYWLSLQVKEMALRKVGGLALWDFLDFIVRTRIPIFVLLRPFIQCKLLAQPAENHEELSARQHIADQLERRFIPRPLCKSSLIAEFNSELKILKEAVHSGSAYQGKTSISTVGTSTSAYRLSLATMSRSNTGTGTVWEQDSEPSQQASQDTLSRTDEEDEENDSISMPSVVSEQEAYLLSAIGRRRFSSHVSSMSVPQAEVGMLPSQSEPNVLDDSQGLAAEGSLSRVASIQSEPGQQNLLVQQPLGRKRGLRQLRRPLLSRQKTQTEPRNRQGARLSTTRRSIQPKTKPSADQKRSVTFIEAQPEPAAAPTDALPATGQLQGCSPAPSRKPEAMDEPVLTSSPAIVVADLHSVSPKQSENFPTEEGEKEEDTEAQGATAHSPLSAQLSDPDDFTGLETSSLLQHGDTVLHISEENGMENPLLSSQFTFTPTELGKTDAVLDESHV

SEQ ID NO: 38000 - protein, 531 aa, Homo sapiens
  REGION 1..531: note = ENSP00000314480
MMDGRLLEHPHAQFGGSLGGVVGFPYPLGHHHVYELAGHQLQSAAAAASVPFSIDGLLGGSCAAAASVVNPTPLLPAACGVGGDGQPFKLSDSGDPDKESPGCKRRRTRTNFTGWQLEELEKAFNESHYPDVFMREALALRLDLVESRVQVWFQNRRAKWRKKENTKKGPGRPAHNSHPTTCSGEPMDPEEIARKELEKMEKKKRKHEKKLLKSQGRHLHSPGGLSLHSAPSSDSDSGGGGLSPEPPEPPPPAAKGPGAHASGAAGTAPAPPGEPPAPGTCDPAFYPSQRSGAGPQPRPGRPADKDAASCGPGAAVAAVERGAAGLPKASPFSVESLLSDSPPRRKAASNAAAAAAAGLDFAPGLPCAPRTLIGKGHFLLYPITQPLGFLVPQAALKGGAGLEPAPKDAPPAPAVPPAPPAQASFGAFSGPGGAPDSAFARRSPDAVASPGAPAPAPAPFRDLASAAATEGGGGDCADAGTAGPAPPPPAPSPRPGPRPPSPAEEPATCGVPEPGAAAGPSPPEGEELDMD

SEQ ID NO: 38001 - protein, 144 aa, Homo sapiens
  REGION 1..144: note = ENSP00000405209
MAATGANAEKAESHNDCPVRLLNPNIAKMKEDILYHFNLTTSRHNFPALFGDVKFVCVGGSPSRMKAFIRCVGAELGLDCPGRDYPNICAGTDRYAMYKVGPVLSVSHGMGIPSISIMLHELIKLLYYARCSNVTIIRIGTSGG

SEQ ID NO: 38002 - protein, 310 aa, Homo sapiens
  REGION 1..310: note = ENSP00000330032
MAATGANAEKAESHNDCPVRLLNPNIAKMKEDILYHFNLTTSRHNFPALFGDVKFVCVGGSPSRMKAFIRCVGAELGLDCPGRDYPNICAGTDRYAMYKVGPVLSVSHGMGIPSISIMLHELIKLLYYARCSNVTIIRIGTSGGIGLEPGTVVITEQAVDTCFKAEFEQIVLGKRVIRKTDLNKKLVQELLLCSAELSEFTTVVGNTMCTLDFYEGQGRLDGALCSYTEKDKQAYLEAAYAAGVRNIEMESSVFAAMCSACGLQAAVVCVTLLNRLEGDQISSPRNVLSEYQQRPQRLVSYFIKKKLSKA

SEQ ID NO: 38003 - protein, 29 aa, Homo sapiens
  REGION 1..29: note = ENSP00000387607
MAATGANAEKAESHNDCPVRLLNPNIAKM

SEQ ID NO: 38004 - protein, 36 aa, Homo sapiens
  REGION 1..36: note = ENSP00000408899
MAATGANAEKAESHKSGARHCGHNRAGSGYLLQGRV

SEQ ID NO: 38005 - protein, 171 aa, Homo sapiens
  REGION 1..171: note = ENSP00000414963
MAATGANAEKAESHNDCPVRLLNPNIAKMKEDILYHFNLTTSRHNFPALFGDVKFVCVGGSPSRMKAFIRCVGAELGLDCPGRDYPNICAGTDRYAMYKVGPVLSVSHGMGIPSISIMLHELIKLLYYARCSNVTIIRIGTSGGIGILKHLRRKDTGKSKGGRERRSTKLR

SEQ ID NO: 38006 - protein, 310 aa, Homo sapiens; identical to SEQ ID NO: 38002
  REGION 1..310: note = ENSP00000378931

SEQ ID NO: 38007 - protein, 146 aa, Homo sapiens
  REGION 1..146: note = ENSP00000390118
MAATGANAEKAESHNDCPVRLLNPNIAKMKEDILYHFNLTTSRHNFPALFGDVKFVCVGGSPSRMKAFIRCVGAELGLDCPGRDYPNICAGTDRYAMYKVGPVLSVSHGMGIPSISIMLHELIKLLYYARCSNVTIIRIGTSGGIG

SEQ ID NO: 38008 - protein, 36 aa, Homo sapiens; identical to SEQ ID NO: 38004
  REGION 1..36: note = ENSP00000378927

SEQ ID NO: 38009 - protein, 85 aa, Homo sapiens
  REGION 1..85: note = ENSP00000396820
MAATGANAEKAESHNDCPVRLLNPNIAKMKEDILYHFNLTTSRHNFPALFGDVKFVCVGGSPSRMKAFISMVWAFLLSQSCCMSS

SEQ ID NO: 38010 - protein, 36 aa, Homo sapiens; identical to SEQ ID NO: 38004
  REGION 1..36: note = ENSP00000413611

SEQ ID NO: 38011 - protein, 920 aa, Homo sapiens
  REGION 1..920: note = ENSP00000366311
MATVAANPAAAAAAVAAAAAVTEDREPQHEELPGLDSQWRQIENGESGRERPLRAGESWFLVEKHWYKQWEAYVQGGDQDSSTFPGCINNATLFQDEINWRLKEGLVEGEDYVLLPAAAWHYLVSWYGLEHGQPPIERKVIELPNIQKVEVYPVELLLVRHNDLGKSHTVQFSHTDSIGLVLRTARERFLVEPQEDTRLWAKNSEGSLDRLYDTHITVLDAALETGQLIIMETRKKDGTWPSAQLHVMNNNMSEEDEDFKGQPGICGLTNLGNTCFMNSALQCLSNVPQLTEYFLNNCYLEELNFRNPLGMKGEIAEAYADLVKQAWSGHHRSIVPHVFKNKVGHFASQFLGYQQHDSQELLSFLLDGLHEDLNRVKKKEYVELCDAAGRPDQEVAQEAWQNHKRRNDSVIVDTFHGLFKSTLVCPDCGNVSVTFDPFCYLSVPLPISHKRVLEVFFIPMDPRRKPEQHRLVVPKKGKISDLCVALSKHTGISPERMMVADVFSHRFYKLYQLEEPLSSILDRDDIFVYEVSGRIEAIEGSREDIVVPVYLRERTPARDYNNSYYGLMLFGHPLLVSVPRDRFTWEGLYNVLMYRLSRYVTKPNSDDEDDGDEKEDDEEDKDDVPGPSTGGSLRDPEPEQAGPSSGVTNRCPFLLDNCLGTSQWPPRRRRKQLFTLQTVNSNGTSDRTTSPEEVHAQPYIAIDWEPEMKKRYYDEVEAEGYVKHDCVGYVMKKAPVRLQECIELFTTVETLEKENPWYCPSCKQHQLATKKLDLWMLPEILIIHLKRFSYTKFSREKLDTLVEFPIRDLDFSEFVIQPQNESNPELYKYDLIAVSNHYGGMRDGHYTTFACNKDSGQWHYFDDNSVSPVNENQIESKAAYVLFYQRQDVARRLLSPAGSSGAPASPACSSPPSSEFMDVN

SEQ ID NO: 38012 - protein, 49 aa, Homo sapiens
  REGION 1..49: note = ENSP00000366282
METRKKDGTWPSAQLHVMNNNMSEEDEDFKGQPGICGLTNLGNTCFMNS

SEQ ID NO: 38013 - protein, 140 aa, Homo sapiens
  REGION 1..140: note = ENSP00000366279
METRKKDGTWPSAQLHVMNNNMSEEDEDFKGQPGICGLTNLGNTCFMNSALQCLSNVPQLTEYFLNNCYLEELNFRNPLGMKGEIAEAYADLVKQAWSGHHRSIVPHVFKNKVGHFASQFLGYQQHDSQELLSFLLDGLH

SEQ ID NO: 38014 - protein, 963 aa, Homo sapiens
  REGION 1..963: note = ENSP00000218348
MAVAPRLFGGLCFRFRDQNPEVAVEGRLPISHSCVGCRRERTAMATVAANPAAAAAAVAAAAAVTEDREPQHEELPGLDSQWRQIENGESGRERPLRAGESWFLVEKHWYKQWEAYVQGGDQDSSTFPGCINNATLFQDEINWRLKEGLVEGEDYVLLPAAAWHYLVSWYGLEHGQPPIERKVIELPNIQKVEVYPVELLLVRHNDLGKSHTVQFSHTDSIGLVLRTARERFLVEPQEDTRLWAKNSEGSLDRLYDTHITVLDAALETGQLIIMETRKKDGTWPSAQLHVMNNNMSEEDEDFKGQPGICGLTNLGNTCFMNSALQCLSNVPQLTEYFLNNCYLEELNFRNPLGMKGEIAEAYADLVKQAWSGHHRSIVPHVFKNKVGHFASQFLGYQQHDSQELLSFLLDGLHEDLNRVKKKEYVELCDAAGRPDQEVAQEAWQNHKRRNDSVIVDTFHGLFKSTLVCPDCGNVSVTFDPFCYLSVPLPISHKRVLEVFFIPMDPRRKPEQHRLVVPKKGKISDLCVALSKHTGISPERMMVADVFSHRFYKLYQLEEPLSSILDRDDIFVYEVSGRIEAIEGSREDIVVPVYLRERTPARDYNNSYYGLMLFGHPLLVSVPRDRFTWEGLYNVLMYRLSRYVTKPNSDDEDDGDEKEDDEEDKDDVPGPSTGGSLRDPEPEQAGPSSGVTNRCPFLLDNCLGTSQWPPRRRRKQLFTLQTVNSNGTSDRTTSPEEVHAQPYIAIDWEPEMKKRYYDEVEAEGYVKHDCVGYVMKKAPVRLQECIELFTTVETLEKENPWYCPSCKQHQLATKKLDLWMLPEILIIHLKRFSYTKFSREKLDTLVEFPIRDLDFSEFVIQPQNESNPELYKYDLIAVSNHYGGMRDGHYTTFACNKDSGQWHYFDDNSVSPVNENQIESKAAYVLFYQRQDVARRLLSPAGSSGAPASPACSSPPSSEFMDVN

SEQ ID NO: 38015 - protein, 1077 aa, Homo sapiens
  REGION 1..1077: note = ENSP00000003302
MTAELQQDDAAGAADGHGSSCQMLLNQLREITGIQDPSFLHEALKASNGDITQAVSLLTDERVKEPSQDTVATEPSEVEGSAANKEVLAKVIDLTHDNKDDLQAAIALSLLESPKIQADGRDLNRMHEATSAETKRSKRKRCEVWGENPNPNDWRRVDGWPVGLKNVGNTCWFSAVIQSLFQLPEFRRLVLSYSLPQNVLENCRSHTEKRNIMFMQELQYLFALMMGSNRKFVDPSAALDLLKGAFRSSEEQQQDVSEFTHKLLDWLEDAFQLAVNVNSPRNKSENPMVQLFYGTFLTEGVREGKPFCNNETFGQYPLQVNGYRNLDECLEGAMVEGDVELLPSDHSVKYGQERWFTKLPPVLTFELSRFEFNQSLGQPEKIHNKLEFPQIIYMDRYMYRSKELIRNKRECIRKLKEEIKILQQKLERYVKYGSGPARFPLPDMLKYVIEFASTKPASESCPPESDTHMTLPLSSVHCSVSDQTSKESTSTESSSQDVESTFSSPEDSLPKSKPLTSSRSSMEMPSQPAPRTVTDEEINFVKTCLQRWRSEIEQDIQDLKTCIASTTQTIEQMYCDPLLRQVPYRLHAVLVHEGQANAGHYWAYIYNQPRQSWLKYNDISVTESSWEEVERDSYGGLRNVSAYCLMYINDKLPYFNAEAAPTESDQMSEVEALSVELKHYIQEDNWRFEQEVEEWEEEQSCKIPQMESSTNSSSQDYSTSQEPSVASSHGVRCLSSEHAVIVKEQTAQAIANTARAYEKSGVEAALSEVMLSPAMQGVILAIAKARQTFDRDGSEAGLIKAFHEEYSRLYQLAKETPTSHSDPRLQHVLVYFFQNEAPKRVVERTLLEQFADKNLSYDERSISIMKVAQAKLKEIGPDDMNMEEYKKWHEDYSLFRKVSVYLLTGLELYQKGKYQEALSYLVYAYQSNAALLMKGPRRGVKESVIALYRRKCLLELNAKAASLFETNDDHSVTEGINVMNELIIPCIHLIINNDISKDDLDAIEVMRNHWCSYLGQDIAENLQLCLGEFLPRLLDPSAEIIVLKEPPTIRPNSPYDLCSRFAAVMESIQGVSTVTVK

SEQ ID NO: 38016 - protein, 753 aa, Homo sapiens
  REGION 1..753: note = ENSP00000442431
MSFLKSLSLCLGKPFCNNETFGQYPLQVNGYRNLDECLEGAMVEGDVELLPSDHSVKYGQERWFTKLPPVLTFELSRFEFNQSLGQPEKIHNKLEFPQIIYMDRYMYRSKELIRNKRECIRKLKEEIKILQQKLERYVKYGSGPARFPLPDMLKYVIEFASTKPASESCPPESDTHMTLPLSSVHCSVSDQTSKESTSTESSSQDVESTFSSPEDSLPKSKPLTSSRSSMEMPSQPAPRTVTDEEINFVKTCLQRWRSEIEQDIQDLKTCIASTTQTIEQMYCDPLLRQVPYRLHAVLVHEGQANAGHYWAYIYNQPRQSWLKYNDISVTESSWEEVERDSYGGLRNVSAYCLMYINDKLPYFNAEAAPTESDQMSEVEALSVELKHYIQEDNWRFEQEVEEWEEEQSCKIPQMESSTNSSSQDYSTSQEPSVASSHGVRCLSSEHAVIVKEQTAQAIANTARAYEKSGVEAALSEAFHEEYSRLYQLAKETPTSHSDPRLQHVLVYFFQNEAPKRVVERTLLEQFADKNLSYDERSISIMKVAQAKLKEIGPDDMNMEEYKKWHEDYSLFRKVSVYLLTGLELYQKGKYQEALSYLVYAYQSNAALLMKGPRRGVKESVIALYRRKCLLELNAKAASLFETNDDHSVTEGINVMNELIIPCIHLIINNDISKDDLDAIEVMRNHWCSYLGQDIAENLQLCLGEFLPRLLDPSAEIIVLKEPPTIRPNSPYDLCSRFAAVMESIQGVSTVTVK

SEQ ID NO: 38017 - protein, 920 aa, Homo sapiens
  REGION 1..920: note = ENSP00000444991
MHEATSAETKRSKRKRCEVWGENPNPNDWRRVDGWPVGLKNVGNTCWFSAVIQSLFQLPEFRRLVLSYSLPQNVLENCRSHTEKRNIMFMQELQYLFALMMGSNRKFVDPSAALDLLKGAFRSSEEQQQDVSEFTHKLLDWLEDAFQLAVNVNSPRNKSENPMVQLFYGTFLTEGVREGKPFCNNETFGQYPLQVNGYRNLDECLEGAMVEGDVELLPSDHSVKYGQERWFTKLPPVLTFELSRFEFNQSLGQPEKIHNKLEFPQIIYMDRYMYRSKELIRNKRECIRKLKEEIKILQQKLERYVKYGSGPARFPLPDMLKYVIEFASTKPASESCPPESDTHMTLPLSSVHCSVSDQTSKESTSTESSSQDVESTFSSPEDSLPKSKPLTSSRSSMEMPSQPAPRTVTDEEINFVKTCLQRWRSEIEQDIQDLKTCIASTTQTIEQMYCDPLLRQVPYRLHAVLVHEGQANAGHYWAYIYNQPRQSWLKYNDISVTESSWEEVERDSYGGLRNVSAYCLMYINDKLPYFNAEAAPTESDQMSEVEALSVELKHYIQEDNWRFEQEVEEWEEEQSCKIPQMESSTNSSSQDYSTSQEPSVASSHGVRCLSSEHAVIVKEQTAQAIANTARAYEKSGVEAALSEAFHEEYSRLYQLAKETPTSHSDPRLQHVLVYFFQNEAPKRVVERTLLEQFADKNLSYDERSISIMKVAQAKLKEIGPDDMNMEEYKKWHEDYSLFRKVSVYLLTGLELYQKGKYQEALSYLVYAYQSNAALLMKGPRRGVKESVIALYRRKCLLELNAKAASLFETNDDHSVTEGINVMNELIIPCIHLIINNDISKDDLDAIEVMRNHWCSYLGQDIAENLQLCLGEFLPRLLDPSAEIIVLKEPPTIRPNSPYDLCSRFAAVMESIQGVSTVTVK

SEQ ID NO: 38018 - protein, 194 aa, Homo sapiens
  REGION 1..194: note = ENSP00000441513
MTAELQQDDAAGAADGHGSSCQMLLNQLREITGIQDPSFLHEALKASNGDITQAVSLLTDERVKEPSQDTVATEPSEVEGSAANKEVLAKVIDLTHDNKDDLQAAIALSLLESPKIQADGRDLNRMHEATSAETKRSKRKRCEVWGENPNPNDWRRVDGWPVGLKNVGNTCWFSAVIQDASSGVPPCRPERVFI

SEQ ID NO: 38019 - protein, 194 aa, Homo sapiens
  REGION 1..194: note = ENSP00000440260
  VARIANT 1: note = Any amino acid
XNWRFEQEVEEWEEEQSCKIPQMESSTNSSSQDYSTSQEPSVASSHGVRCLSSEHAVIVKEQTAQAIANTARAYEKSGVEAALSELKEAEPKKPMPQETNLAEQSEQPPKANDAESTAQPNSEVMLSPAMQGVILAIAKARQTFDRDGSEAGLIKAFHEEYSRLYQLAKETPTSHSDPRLQHVLVYFFQNEAPK

SEQ ID NO: 38020 - protein, 360 aa, Homo sapiens
  REGION 1..360: note = ENSP00000442257
AALDLLKGAFRSSEEQQQDVSEFTHKLLDWLEDAFQLAVNVNSPRNKSENPMVQLFYGTFLTEGVREGKPFCNNETFGQYPLQVNGYRNLDECLEGAMVEGDVELLPSDHSVKYGQERWFTKLPPVLTFELSRFEFNQSLGQPEKIHNKLEFPQIIYMDRYMYRSKELIRNKRECIRKLKEEIKILQQKLESTSTESSSQDVESTFSSPEDSLPKSKPLTSSRSSMEMPSQPAPRTVTDEEINFVKTCLQRWRSEIEQDIQDLKTCIASTTQTIEQMYCDPLLRQVPYRLHAVLVHEGQANAGHYWAYIYNQPRQSWLKYNDISVTESSWEEVERDSYGGLRNVSAYCLMYINDKLPYFN

SEQ ID NO: 38021 - protein, 583 aa, Homo sapiens
  REGION 1..583: note = ENSP00000445743
MTAELQQDDAAGAADGHGSSCQMLLNQLREITGIQDPSFLHEALKASNGDITQAVSLLTDERVKEPSQDTVATEPSEVEGSAANKEVLAKVIDLTHDNKDDLQAAIALSLLESPKIQADGRDLNRMHEATSAETKRSKRKRCEVWGENPNPNDWRRVDGWPVGLKNVGNTCWFSAVIQSLFQLPEFRRLVLSYSLPQNVLENCRSHTEKRNIMFMQELQYLFALMMGSNRKFVDPSAALDLLKGAFRSSEEQQQDVSEFTHKLLDWLEDAFQLAVNVNSPRNKSENPMVQLFYGTFLTEGVREGKPFCNNETFGQYPLQVNGYRNLDECLEGAMVEGDVELLPSDHSVKYGQERWFTKLPPVLTFELSRFEFNQSLGQPEKIHNKLEFPQIIYMDRYMYRSKELIRNKRECIRKLKEEIKILQQKLERYVKYGSGPARFPLPDMLKYVIEFASTKPASESCPPESDTHMTLPLSSVHCSVSDQTSKESTSTESSSQDVESTFSSPEDSLPKSKPLTSSRSSMEMPSQPAPRTVTDEEINFVKTCLQRWRSEIEQDIQDLKTCIASTTQTIEQMYCDPLLRQVE

SEQ ID NO: 38022 - protein, 51 aa, Homo sapiens
  REGION 1..51: note = ENSP00000438050
  VARIANT 1: note = Any amino acid
XRNIMFMQELQYLFALMMGSNRKFVDPSAALDLLKGAFRSSEEQQQSQEQI

SEQ ID NO: 38023 - protein, 40 aa, Homo sapiens
  REGION 1..40: note = ENSP00000437688
  VARIANT 1: note = Any amino acid
XFALMMGSNRKFVDPSAALDLLKGAFRSSEEQQQQSQEQI

SEQ ID NO: 38024 - protein, 91 aa, Homo sapiens
  REGION 1..91: note = ENSP00000445722
  VARIANT 1: note = Any amino acid
XNPELSPFPKSSSPRNKSENPMVQLFYGTFLTEGVREGKPFCNNETFGQYPLQVNGYRNLDECLEGAMVEGDVELLPSDHSVKYGQEPTCT

SEQ ID NO: 38025 - protein, 244 aa, Homo sapiens
  REGION 1..244: note = ENSP00000440799
CGAAAGRRGRRGRRPRLEVIDLTHDNKDDLQAAIALSLLESPKIQADGRDLNRMHEATSAETKRSKRKRCEVWGENPNPNDWRRVDGWPVGLKNVGNTCWFSAVIQEKRNIMFMQELQYLFALMMGSNRKFVDPSAALDLLKGAFRSSEEQQQDVSEFTHKLLDWLEDAFQLAVNVNSPRNKSENPMVQLFYGTFLTEGVREGKPFCNNETFGQYPLQVNGYRNLDECLEGAMVEGDVELLPSD

SEQ ID NO: 38026 - protein, 77 aa, Homo sapiens
  REGION 1..77: note = ENSP00000446284
MRNYICRTKLADRYPQSCQMLLNQLREITGIQDPSFLHEALKASNGDITQAVSLLTDERVKEPSQDTVATEPSEVEG

SEQ ID NO: 38027 - protein, 46 aa, Homo sapiens
  REGION 1..46: note = ENSP00000437450
MRNYICRTKLADRYPQSCQMLLNQLREITGIQDPSFLHEALKASNG

SEQ ID NO: 38028 - protein, 979 aa, Homo sapiens
  REGION 1..979: note = ENSP00000258399
MSPLKIHGPIRIRSMQTGITKWKEGSFEIVEKENKVSLVVHYNTGGIPRIFQLSHNIKNVVLRPSGAKQSRLMLTLQDNSFLSIDKVPSKDAEEMRLFLDAVHQNRLPAAMKPSQGSGSFGAILGSRTSQKETSRQLSYSDNQASAKRGSLETKDDIPFRKVLGNPGRGSIKTVAGSGIARTIPSLTSTSTPLRSGLLENRTEKRKRMISTGSELNEDYPKENDSSSNNKAMTDPSRKYLTSSREKQLSLKQSEENRTSGLLPLQSSSFYGSRAGSKEHSSGGTNLDRTNVSSQTPSAKRSLGFLPQPVPLSVKKLRCNQDYTGWNKPRVPLSSHQQQQLQGFSNLGNTCYMNAILQSLFSLQSFANDLLKQGIPWKKIPLNALIRRFAHLLVKKDICNSETKKDLLKKVKNAISATAERFSGYMQNDAHEFLSQCLDQLKEDMEKLNKTWKTEPVSGEENSPDISATRAYTCPVITNLEFEVQHSIICKACGEIIPKREQFNDLSIDLPRRKKPLPPRSIQDSLDLFFRAEELEYSCEKCGGKCALVRHKFNRLPRVLILHLKRYSFNVALSLNNKIGQQVIIPRYLTLSSHCTENTKPPFTLGWSAHMAISRPLKASQMVNSCITSPSTPSKKFTFKSKSSLALCLDSDSEDELKRSVALSQRLCEMLGNEQQQEDLEKDSKLCPIEPDKSELENSGFDRMSEEELLAAVLEISKRDASPSLSHEDDDKPTSSPDTGFAEDDIQEMPENPDTMETEKPKTITELDPASFTEITKDCDENKENKTPEGSQGEVDWLQQYDMEREREEQELQQALAQSLQEQEAWEQKEDDDLKRATELSLQEFNNSFVDALGSDEDSGNEDVFDMEYTEAEAEELKRNAETGNLPHSYRLISVVSHIGSTSSSGHYISDVYDIKKQAWFTYNDLEVSKIQEAAVQSDRDRSGYIFFYMHKEIFDELLETEKNSQSLSTEVGKTTRQAL

SEQ ID NO: 38029 - protein, 979 aa, Homo sapiens; identical to SEQ ID NO: 38028
  REGION 1..979: note = ENSP00000393662

SEQ ID NO: 38030 - protein, 885 aa, Homo sapiens
  REGION 1..885: note = ENSP00000400902
MLTLQDNSFLSIDKVPSKDAEEMRLFLDAVHQNRLPAAMKPSQGSGSFGAILGSRTSQKETSRQLSYSDNQASAKRGSLETKDDIPFRKVLGNPGRGSIKTVAGSGIARTIPSLTSTSTPLRSGLLENRTEKRKRMISTGSELNEDYPKENDSSSNNKAMTDPSRKYLTSSREKQLSLKQSEENRTSGLLPLQSSSFYGSRAGSKEHSSGGTNLDRTNVSSQTPSAKRSLGFLPQPVPLSVKKLRCNQDYTGWNKPRVPLSSHQQQQLQGFSNLGNTCYMNAILQSLFSLQSFANDLLKQGIPWKKIPLNALIRRFAHLLVKKDICNSETKKDLLKKVKNAISATAERFSGYMQNDAHEFLSQCLDQLKEDMEKLNKTWKTEPVSGEENSPDISATRAYTCPVITNLEFEVQHSIICKACGEIIPKREQFNDLSIDLPRRKKPLPPRSIQDSLDLFFRAEELEYSCEKCGGKCALVRHKFNRLPRVLILHLKRYSFNVALSLNNKIGQQVIIPRYLTLSSHCTENTKPPFTLGWSAHMAMKFTFKSKSSLALCLDSDSEDELKRSVALSQRLCEMLGNEQQQEDLEKDSKLCPIEPDKSELENSGFDRMSEEELLAAVLEISKRDASPSLSHEDDDKPTSSPDTGFAEDDIQEMPENPDTMETEKPKTITELDPASFTEITKDCDENKENKTPEGSQGEVDWLQQYDMEREREEQELQQALAQSLQEQEAWEQKEDDDLKRATELSLQEFNNSFVDALGSDEDSGNEDVFDMEYTEAEAEELKRNAETGNLPHSYRLISVVSHIGSTSSSGHYISDVYDIKKQAWFTYNDLEVSKIQEAAVQSDRDRSGYIFFYMHKEIFDELLETEKNSQSLSTEVGKTTRQAL

SEQ ID NO: 38031 - protein, 979 aa, Homo sapiens; identical to SEQ ID NO: 38028
  REGION 1..979: note = ENSP00000396585

SEQ ID NO: 38032 - protein, 302 aa, Homo sapiens
  REGION 1..302: note = ENSP00000345043
MSPLKIHGPIRIRSMQTGITKWKEGSFEIVEKENKVSLVVHYNTGGIPRIFQLSHNIKNVVLRPSGAKQSRLMLTLQDNSFLSIDKVPSKDAEEMRLFLDAVHQNRLPAAMKPSQGSGSFGAILGSRTSQKETSRQLSYSDNQASAKRGSLETKDDIPFRKVLGNPGRGSIKTVAGSGIARTIPSLTSTSTPLRSGLLENRTEKRKRMISTGSELNEDYPKENDSSSNNKAMTDPSRKYLTSSREKQLSLKQSEENRTSGLLPLQSSSFYGSRAGSKEHSSGGTNLDRFIGYKYIRYLLSTC

SEQ ID NO: 38033 - protein, 916 aa, Homo sapiens
  REGION 1..916: note = ENSP00000341028
MAEGGGCRERPDAETQKSELGPLMRTTLQRGAQWYLIDSRWFKQWKKYVGFDSWDMYNVGEHNLFPGPIDNSGLFSDPESQTLKEHLIDELDYVLVPTEAWNKLLNWYGCVEGQQPIVRKVVEHGLFVKHCKVEVYLLELKLCENSDPTNVLSCHFSKADTIATIEKEMRKLFNIPAERETRLWNKYMSNTYEQLSKLDNTVQDAGLYQGQVLVIEPQNEDGTWPRQTLQSNGSGFSASYNCQEPPSSHIQPGLCGLGNLGNTCFMNSALQCLSNTAPLTDYFLKDEYEAEINRDNPLGMKGEIAEAYAELIKQMWSGRDAHVAPRMFKTQVGRFAPQFSGYQQQDSQELLAFLLDGLHEDLNRVKKKPYLELKDANGRPDAVVAKEAWENHRLRNDSVIVDTFHGLFKSTLVCPECAKVSVTFDPFCYLTLPLPLKKDRVMEVFLVPADPHCRPTQYRVTVPLMGAVSDLCEALSRLSGIAAENMVVADVYNHRFHKIFQMDEGLNHIMPRDDIFVYEVCSTSVDGSECVTLPVYFRERKSRPSSTSSASALYGQPLLLSVPKHKLTLESLYQAVCDRISRYVKQPLPDEFGSSPLEPGACNGSRNSCEGEDEEEMEHQEEGKEQLSETEGSGEDEPGNDPSETTQKKIKGQPCPKRLFTFSLVNSYGTADINSLAADGKLLKLNSRSTLAMDWDSETRRLYYDEQESEAYEKHVSMLQPQKKKKTTVALRDCIELFTTMETLGEHDPWYCPNCKKHQQATKKFDLWSLPKILVVHLKRFSYNRYWRDKLDTVVEFPIRGLNMSEFVCNLSARPYVYDLIAVSNHYGAMGVGHYTAYAKNKLNGKWYYFDDSNVSLASEDQIVTKAAYVLFYQRRDDEFYKTPSLSSSGSSDGGTRPSSSQQGFGDDEACSMDTN

SEQ ID NO: 38034 - protein, 963 aa, Homo sapiens
  REGION 1..963: note = ENSP00000265560
MAEGGGCRERPDAETQKSELGPLMRTTLQRGAQWYLIDSRWFKQWKKYVGFDSWDMYNVGEHNLFPGPIDNSGLFSDPESQTLKEHLIDELDYVLVPTEAWNKLLNWYGCVEGQQPIVRKVVEHGLFVKHCKVEVYLLELKLCENSDPTNVLSCHFSKADTIATIEKEMRKLFNIPAERETRLWNKYMSNTYEQLSKLDNTVQDAGLYQGQVLVIEPQNEDGTWPRQTLQSKSSTAPSRNFTTSPKSSASPYSSVSASLIANGDSTSTCGMHSSGVSRGGSGFSASYNCQEPPSSHIQPGLCGLGNLGNTCFMNSALQCLSNTAPLTDYFLKDEYEAEINRDNPLGMKGEIAEAYAELIKQMWSGRDAHVAPRMFKTQVGRFAPQFSGYQQQDSQELLAFLLDGLHEDLNRVKKKPYLELKDANGRPDAVVAKEAWENHRLRNDSVIVDTFHGLFKSTLVCPECAKVSVTFDPFCYLTLPLPLKKDRVMEVFLVPADPHCRPTQYRVTVPLMGAVSDLCEALSRLSGIAAENMVVADVYNHRFHKIFQMDEGLNHIMPRDDIFVYEVCSTSVDGSECVTLPVYFRERKSRPSSTSSASALYGQPLLLSVPKHKLTLESLYQAVCDRISRYVKQPLPDEFGSSPLEPGACNGSRNSCEGEDEEEMEHQEEGKEQLSETEGSGEDEPGNDPSETTQKKIKGQPCPKRLFTFSLVNSYGTADINSLAADGKLLKLNSRSTLAMDWDSETRRLYYDEQESEAYEKHVSMLQPQKKKKTTVALRDCIELFTTMETLGEHDPWYCPNCKKHQQATKKFDLWSLPKILVVHLKRFSYNRYWRDKLDTVVEFPIRGLNMSEFVCNLSARPYVYDLIAVSNHYGAMGVGHYTAYAKNKLNGKWYYFDDSNVSLASEDQIVTKAAYVLFYQRRDDEFYKTPSLSSSGSSDGGTRPSSSQQGFGDDEACSMDTN

SEQ ID NO: 38035 - protein, 621 aa, Homo sapiens
  REGION 1..621: note = ENSP00000399079
  VARIANT 1: note = Any amino acid
XPKSSASPYSSVSASLIANGDSTSTCGMHSSGVSRGGSGFSASYNCQEPPSSHIQPGLCGLGNLGNTCFMNSALQCLSNTAPLTDYFLKDEYEAEINRDNPLGMKGEIAEAYAELIKQMWSGRDAHVAPRMFKTQVGRFAPQFSGYQQQDSQELLAFLLDGLHEDLNRVVAKEAWENHRLRNDSVIVDTFHGLFKSTLVCPECAKVSVTFDPFCYLTLPLPLKKDRVMEVFLVPADPHCRPTQYRVTVPLMGAVSDLCEALSRLSGIAAENMVVADVYNHRFHKIFQMDEGLNHIMPRDDIFVYEVCSTSVDGSECVTLPVYFRERKSRPSSTSSASALYGQPLLLSVPKHKLTLESLYQAVCDRISRYVKQPLPDEFGSSPLEPGACNGSRNSCEGEDEEEMEHQEEGKEQLSETEGSGEDEPGNDPSETTQKKIKGQPCPKRLFTFSLVNSYGTADINSLAADGKLLKLNSRSTLAMDWDSETRRLYYDEQESEAYEKHVSMLQPQKKKKTTVALRDCIELFTTMETLGEHDPWYCPNCKKHQQATKKFDLWSLPKILVVHLKRFSYNRYWRDKLDTVVEFPIRGLNMSEFVCNLSARPYVYDLIAVSNHYGAMGVGHY

SEQ ID NO: 38036 - protein, 313 aa, Homo sapiens
  REGION 1..313: note = ENSP00000400623
MAEGGGCRERPDAETQKSELGPLMRTTLQRGAQWYLIDSRWFKQWKKYVGFDSWDMYNVGEHNLFPGPIDNSGLFSDPESQTLKEHLIDELDYVLVPTEAWNKLLNWYGCVEGQQPIVRKVVEHGLFVKHCKVEVYLLELKLCENSDPTNVLSCHFSKADTIATIEKEMRKLFNIPAERETRLWNKYMSNTYEQLSKLDNTVQDAGLYQGQVLVIEPQNEDGTWPRQTLQSKVSFFLPRLECNGAILAHCNFCLPGSSNSPASASRVAPSHLANFFFFEMESHSVTKLECGGAVSAYSRVQVMLLPQPPEWLG

SEQ ID NO: 38037 - protein, 363 aa, Homo sapiens
  REGION 1..363: note = ENSP00000408274
MAEGGGCRERPDAETQKSELGPLMRTTLQRGAQWYLIDSRWFKQWKKYVGFDSWDMYNVGEHNLFPGPIDNSGLFSDPESQTLKEHLIDELDYVLVPTEAWNKLLNWYGCVEGQQPIVRKVVEHGLFVKHCKVEVYLLELKLCENSDPTNVLSCHFSKADTIATIEKEMRKLFNIPAERETRLWNKYMSNTYEQLSKLDNTVQDAGLYQGQVLVIEPQNEDGTWPRQTLQSKGPQEMLTQQGMALQNYDNKLVKCIEELCQKQEELCWQIQQEEDKKQRLQNEVRQLTEKLACVNEKLARVNENLARKIASCSKFYQTIAETEATYLKMLESSQTLLSVLKREAGNLTKATASDQKSSGGRDS

SEQ ID NO: 38038 - protein, 1118 aa, Homo sapiens
  REGION 1..1118: note = ENSP00000458963
MDLGPGDAAGGGPLAPRPRRRRSLRRLFSRFLLALGSRSRPGDSPPRPQPGHCDGDGEGGFACAPGPVPAAPGSPGEERPPGPQPQLQLPAGDGARPPGAQGLKNHGNTCFMNAVVQCLSNTDLLAEFLALGRYRAAPGRAEVTEQLAALVRALWTREYTPQLSAEFKNAVSKYGSQFQGNSQHDALEFLLWLLDRVHEDLEGSSRGPVSEKLPPEATKTSENCLSPSAQLPLGQSFVQSHFQAQYRSSLTCPHCLKQSNTFDPFLCVSLPIPLRQTRFLSVTLVFPSKSQRFLRVGLAVPILSTVAALRKMVAEEGGVPADEVILVELYPSGFQRSFFDEEDLNTIAEGDNVYAFQVPPSPSQGTLSAHPLGLSASPRLAAREGQRFSLSLHSESKVLILFCNLVGSGQQASRFGPPFLIREDRAVSWAQLQQSILSKVRHLMKSEAPVQNLGSLFSIRVVGLSVACSYLSPKDSRPLCHWAVDRVLHLRRPGGPPHVKLAVEWDSSVKERLFGSLQEERAQDADSVWQQQQAHQQHSCTLDECFQFYTKEEQLAQDDAWKCPHCQVLQQGMVKLSLWTLPDILIIHLKRFCQVGERRNKLSTLVKFPLSGLNMAPHVAQRSTSPEAGLGPWPSWKQPDCLPTSYPLDFLYDLYAVCNHHGNLQAYCRNSLDGQWYSYDDSTVEPLREDEVNTRGAYILFYQKRNSIPPWSASSSMRGSTSSSLSDHWLLRLGSHAGSTRGSLLSWSSAPCPSLPQVPDSPIFTNSLCNQEKGGLEPRRLVRGVKGRSISMKAPTTSRAKQGPFKTMPLRWSFGSKEKPPGASVELVEYLESRRRPRSTSQSIVSLLTGTAGEDEKSASPRSNVALPANSEDGGRAIERGPAGVPCPSAQPNHCLAPGNSDGPNTARKLKENAGQDIKLPRKFDLPLTVMPSVEHEKPARPEGQKAMNWKESFQMGSKSSPPSPYMGFSGNSKDSRRGTSELDRPLQGTLTLLRSVFRKKENRRNERAEVSPQVPPVSLVSGGLSPAMDGQAPGSPPALRIPEGLARGLGSRLERDVWSAPSSLRLPRKASRAPRGSALGMSQRTVPGEQASYGTFQRVKYHTLSLGRKKTLPESSF

SEQ ID NO: 38039 - protein, 1123 aa, Homo sapiens
  REGION 1..1123: note = ENSP00000285199
MDLGPGDAAGGGPLAPRPRRRRSLRRLFSRFLLALGSRSRPGDSPPRPQPGHCDGDGEGGFACAPGPVPAAPGSPGEERPPGPQPQLQLPAGDGARPPGAQGLKNHGNTCFMNAVVQCLSNTDLLAEFLALGRYRAAPGRAEVTEQLAALVRALWTREYTPQLSAEFKNAVSKYGSQFQGNSQHDALEFLLWLLDRVHEDLEGSSRGPVSEKLPPEATKTSENCLSPSAQLPLGQSFVQSHFQAQYRSSLTCPHCLKQSNTFDPFLCVSLPIPLRQTRFLSVTLVFPSKSQRFLRVGLAVPILSTVAALRKMVAEEGGVPADEVILVELYPSGFQRSFFDEEDLNTIAEGDNVYAFQVPPSPSQGTLSAHPLGLSASPRLAAREGQRFSLSLHSESKVLILFCNLVGSGQQASRFGPPFLIREDRAVSWAQLQQSILSKVRHLMKSEAPVQNLGSLFSIRVVGLSVACSYLSPKDSRPLCHWAVDRVLHLRRPGGPPHVKLAVEWDSSVKERLFGSLQEERAQDADSVWQQQQAHQQHSCTLDECFQFYTKEEQLAQDDAWKCPHCQVLQQGMVKLSLWTLPDILIIHLKRFCQVGERRNKLSTLVKFPLSGLNMAPHVAQRSTSPEAGLGPWPSWKQPDCLPTSYPLDFLYDLYAVCNHHGNLQGGHYTAYCRNSLDGQWYSYDDSTVEPLREDEVNTRGAYILFYQKRNSIPPWSASSSMRGSTSSSLSDHWLLRLGSHAGSTRGSLLSWSSAPCPSLPQVPDSPIFTNSLCNQEKGGLEPRRLVRGVKGRSISMKAPTTSRAKQGPFKTMPLRWSFGSKEKPPGASVELVEYLESRRRPRSTSQSIVSLLTGTAGEDEKSASPRSNVALPANSEDGGRAIERGPAGVPCPSAQPNHCLAPGNSDGPNTARKLKENAGQDIKLPRKFDLPLTVMPSVEHEKPARPEGQKAMNWKESFQMGSKSSPPSPYMGFSGNSKDSRRGTSELDRPLQGTLTLLRSVFRKKENRRNERAEVSPQVPPVSLVSGGLSPAMDGQAPGSPPALRIPEGLARGLGSRLERDVWSAPSSLRLPRKASRAPRGSALGMSQRTVPGEQASYGTFQRVKYHTLSLGRKKTLPESSF

SEQ ID NO: 38040 - protein, 910 aa, Homo sapiens
  REGION 1..910: note = ENSP00000459328
  VARIANT 1: note = Any amino acid
XAIPSTTPWNSCSGCWIVYMRTWRVHPEGRCRRRSSLTCPHCLKQSNTFDPFLCVSLPIPLRQTRFLSVTLVFPSKSQRFLRVGLAVPILSTVAALRKMVAEEGGVPADEVILVELYPSGFQRSFFDEEDLNTIAEGDNVYAFQVPPSPSQGTLSAHPLGLSASPRLAAREGQRFSLSLHSESKVLILFCNLVGSGQQASRFGPPFLIREDRAVSWAQLQQSILSKVRHLMKSEAPVQNLGSLFSIRVVGLSVACSYLSPKDSRPLCHWAVDRVLHLRRPGGPPHVKLAVEWDSSVKERLFGSLQEERAQDADSVWQQQQAHQQHSCTLDECFQFYTKEEQLAQDDAWKCPHCQVLQQGMVKLSLWTLPDILIIHLKRFCQVGERRNKLSTLVKFPLSGLNMAPHVAQRSTSPEAGLGPWPSWKQPDCLPTSYPLDFLYDLYAVCNHHGNLQGGHYTAYCRNSLDGQWYSYDDSTVEPLREDEVNTRGAYILFYQKRNSIPPWSASSSMRGSTSSSLSDHWLLRLGSHAGSTRGSLLSWSSAPCPSLPQVPDSPIFTNSLCNQEKGGLEPRRLVRGVKGRSISMKAPTTSRAKQGPFKTMPLRWSFGSKEKPPGASVELVEYLESRRRPRSTSQSIVSLLTGTAGEDEKSASPRSNVALPANSEDGGRAIERGPAGVPCPSAQPNHCLAPGNSDGPNTARKLKENAGQDIKLPRKFDLPLTVMPSVEHEKPARPEGQKAMNWKESFQMGSKSSPPSPYMGFSGNSKDSRRGTSELDRPLQGTLTLLRSVFRKKENRRNERAEVSPQVPPVSLVSGGLSPAMDGQAPGSPPALRIPEGLARGLGSRLERDVWSAPSSLRLPRKASRAPRGSALGMSQRTVPGEQASYGTFQRVKYHTLSLGRKKTLPESSF

SEQ ID NO: 38041 - protein, 648 aa, Homo sapiens
  REGION 1..648: note = ENSP00000477318
AACSGASRRSERRMPTVCGSSSRRISSTAVPWMNVFSSTPRRSRSRPGGPCPGREGGWLPLVGWPRAAGASQSGWFAFQLAQDDAWKCPHCQVLQQGMVKLSLWTLPDILIIHLKRFCQVGERRNKLSTLVKFPLSGLNMAPHVAQRSTSPEAGLGPWPSWKQPDCLPTSYPLDFLYDLYAVCNHHGNLQGGHYTAYCRNSLDGQWYSYDDSTVEPLREDEVNTRGAYILFYQKRNSIPPWSASSSMRGSTSSSLSDHWLLRLGSHAGSTRGSLLSWSSAPCPSLPQVPDSPIFTNSLCNQEKGGLEPRRLVRGVKGRSISMKAPTTSRAKQGPFKTMPLRWSFGSKEKPPGASVELVEYLESRRRPRSTSQSIVSLLTGTAGEDEKSASPRSNVALPANSEDGGRAIERGPAGVPCPSAQPNHCLAPGNSDGPNTARKLKENAGQDIKLPRKFDLPLTVMPSVEHEKPARPEGQKAMNWKESFQMGSKSSPPSPYMGFSGNSKDSRRGTSELDRPLQGTLTLLRSVFRKKENRRNERAEVSPQVPPVSLVSGGLSPAMDGQAPGSPPALRIPEGLARGLGSRLERDVWSAPSSLRLPRKASRAPRGSALGMSQRTVPGEQASYGTFQRVKYHTLSLGRKKTLPESSF

SEQ ID NO: 38042 - protein, 2555 aa, Homo sapiens
  REGION 1..2555: note = ENSP00000342812
MTAITHGSPVGGNDSQGQVLDGQSQHLFQQNQTSSPDSSNENSVATPPPEEQGQGDAPPQHEDEEPAFPHTELANLDDMINRPRWVVPVLPKGELEVLLEAAIDLSVKGLDVKSEACQRFFRDGLTISFTKILMDEAVSGWKFEIHRCIINNTHRLVELCVAKLSQDWFPLLELLAMALNPHCKFHIYNGTRPCELISSNAQLPEDELFARSSDPRSPKGWLVDLINKFGTLNGFQILHDRFFNGSALNIQIIAALIKPFGQCYEFLSQHTLKKYFIPVIEIVPHLLENLTDEELKKEAKNEAKNDALSMIIKSLKNLASRISGQDETIKNLEIFRLKMILRLLQISSFNGKMNALNEINKVISSVSYYTHRHSNPEEEEWLTAERMAEWIQQNNILSIVLQDSLHQPQYVEKLEKILRFVIKEKALTLQDLDNIWAAQAGKHEAIVKNVHDLLAKLAWDFSPGQLDHLFDCFKASWTNASKKQREKLLELIRRLAEDDKDGVMAHKVLNLLWNLAQSDDVPVDIMDLALSAHIKILDYSCSQDRDAQKIQWIDHFIEELRTNDKWVIPALKQIREICSLFGEASQNLSQTQRSPHIFYRHDLINQLQQNHALVTLVAENLATYMNSIRLYAGDHEDYDPQTVRLGSRYSHVQEVQERLNFLRFLLKDGQLWLCAPQAKQIWKCLAENAVYLCDREACFKWYSKLMGDEPDLDPDINKDFFESNVLQLDPSLLTENGMKCFERFFKAVNCRERKLIAKRRSYMMDDLELIGLDYLWRVVIQSSDEIANRAIDLLKEIYTNLGPRLKANQVVIHEDFIQSCFDRLKASYDTLCVFDGDKNSINCARQEAIRMVRVLTVIKEYINECDSDYHKERMILPMSRAFRGKHLSLIVRFPNQGRQVDELDIWSHTNDTIGSVRRCIVNRIKANVAHKKIELFVGGELIDSEDDRKLIGQLNLKDKSLITAKLTQINFNMPSSPDSSSDSSTASPGNHRNHYNDGPNLEVESCLPGVIMSVHPRYISFLWQVADLGSNLNMPPLRDGARVLMKLMPPDRTAVEKLRAVCLDHAKLGEGKLSPPLDSLFFGPSASQVLYLTEVVYALLMPAGVPLTDGSSDFQVHFLKSGGLPLVLSMLIRNNFLPNTDMETRRGAYLNALKIAKLLLTAIGYGHVRAVAEACQPVVDGTDPITQINQVTHDQAVVLQSALQSIPNPSSECVLRNESILLAQEISNEASRYMPDICVIRAIQKIIWASACGALGLVFSPNEEITKIYQMTTNGSNKLEVEDEQVCCEALEVMTLCFALLPTALDALSKEKAWQTFIIDLLLHCPSKTVRQLAQEQFFLMCTRCCMGHRPLLFFITLLFTILGSTAREKGKYSGDYFTLLRHLLNYAYNGNINIPNAEVLLVSEIDWLKRIRDNVKNTGETGVEEPILEGHLGVTKELLAFQTSEKKYHFGCEKGGANLIKELIDDFIFPASKVYLQYLRSGELPAEQAIPVCSSPVTINAGFELLVALAIGCVRNLKQIVDCLTEMYYMGTAITTCEALTEWEYLPPVGPRPPKGFVGLKNAGATCYMNSVIQQLYMIPSIRNSILAIEGTGSDLHDDMFGDEKQDSESNVDPRDDVFGYPHQFEDKPALSKTEDRKEYNIGVLRHLQVIFGHLAASQLQYYVPRGFWKQFRLWGEPVNLREQHDALEFFNSLVDSLDEALKALGHPAILSKVLGGSFADQKICQGCPHRYECEESFTTLNVDIRNHQNLLDSLEQYIKGDLLEGANAYHCEKCDKKVDTVKRLLIKKLPRVLAIQLKRFDYDWERECAIKFNDYFEFPRELDMGPYTVAGVANLERDNVNSENELIEQKEQSDNETAGGTKYRLVGVLVHSGQASGGHYYSYIIQRNGKDDQTDHWYKFDDGDVTECKMDDDEEMKNQCFGGEYMGEVFDHMMKRMSYRRQKRWWNAYILFYEQMDMIDEDDEMIRYISELTIARPHQIIMSPAIERSVRKQNVKFMHNRLQYSLEYFQFVKKLLTCNGVYLNPAPGQDYLLPEAEEITMISIQLAARFLFTTGFHTKKIVRGPASDWYDALCVLLRHSKNVRFWFTHNVLFNVSNRFSEYLLECPSAEVRGAFAKLIVFIAHFSLQDGSCPSPFASPGPSSQACDNLSLSDHLLRATLNLLRREVSEHGHHLQQYFNLFVMYANLGVAEKTQLLKLNVPATFMLVSLDEGPGPPIKYQYAELGKLYSVVSQLIRCCNVSSTMQSSINGNPPLPNPFGDLNLSQPIMPIQQNVLDILFVRTSYVKKIIEDCSNSEDTIKLLRFCSWENPQFSSTVLSELLWQVAYSYTYELRPYLDLLFQILLIEDSWQTHRIHNALKGIPDDRDGLFDTIQRSKNHYQKRAYQCIKCMVALFSSCPVAYQILQGNGDLKRKWTWAVEWLGDELERRPYTGNPQYSYNNWSPPVQSNETANGYFLERSHSARMTLAKACELCPEEEPDDQDAPDEHEPSPSEDAPLYPHSPASQYQQNNHVHGQPYTGPAAHHLNNPQKTGQRTQENYEGNEEVSSPQMKDQ

SEQ ID NO: 38043 - protein, 237 aa, Homo sapiens
  REGION 1..237: note = ENSP00000406876
  VARIANT 1: note = Any amino acid
XLLKTAVTQRIPSNYFAFALGRILSSHLLSSANFSGRIHNALKGIPDDRDGLFDTIQRSKNHYQKRAYQCIKCMVALFSSCPVAYQILQGNGDLKRKWTWAVEWLGDELERRPYTGNPQYSYNNWSPPVQSNETANGYFLERSHSARMTLAKACELCPEEEPDDQDAPDEHEPSPSEDAPLYPHSPASQYQQNNHVHGQPYTGPAAHHLNNPQKTGQRTQENYEGNEEVSSPQMKDQ

SEQ ID NO: 38044 - protein, 1092 aa, Homo sapiens
  REGION 1..1092: note = ENSP00000255304
MMDSPKIGNGLPVIGPGTDIGISSLHMVGYLGKNFDSAKVPSDEYCPACREKGKLKALKTYRISFQESIFLCEDLQCIYPLGSKSLNNLISPDLEECHTPHKPQKRKSLESSYKDSLLLANSKKTRNYIAIDGGKVLNSKHNGEVYDETSSNLPDSSGQQNPIRTADSLERNEILEADTVDMATTKDPATVDVSGTGRPSPQNEGCTSKLEMPLESKCTSFPQALCVQWKNAYALCWLDCILSALVHSEELKNTVTGLCSKEESIFWRLLTKYNQANTLLYTSQLSGVKDGDCKKLTSEIFAEIETCLNEVRDEIFISLQPQLRCTLGDMESPVFAFPLLLKLETHIEKLFLYSFSWDFECSQCGHQYQNRHMKSLVTFTNVIPEWHPLNAAHFGPCNNCNSKSQIRKMVLEKVSPIFMLHFVEGLPQNDLQHYAFHFEGCLYQITSVIQYRANNHFITWILDADGSWLECDDLKGPCSERHKKFEVPASEIHIVIWERKISQVTDKEAACLPLKKTNDQHALSNEKPVSLTSCSVGDAASAETASVTHPKDISVAPRTLSQDTAVTHGDHLLSGPKGLVDNILPLTLEETIQKTASVSQLNSEAFLLENKPVAENTGILKTNTLLSQESLMASSVSAPCNEKLIQDQFVDISFPSQVVNTNMQSVQLNTEDTVNTKSVNNTDATGLIQGVKSVEIEKDAQLKQFLTPKTEQLKPERVTSQVSNLKKKETTADSQTTTSKSLQNQSLKENQKKPFVGSWVKGLISRGASFMPLCVSAHNRNTITDLQPSVKGVNNFGGFKTKGINQKASHVSKKARKSASKPPPISKPPAGPPSSNGTAAHPHAHAASEVLEKSGSTSCGAQLNHSSYGNGISSANHEDLVEGQIHKLRLKLRKKLKAEKKKLAALMSSPQSRTVRSENLEQVPQDGSPNDCESIEDLLNELPYPIDIASESACTTVPGVSLYSSQTHEEILAELLSPTPVSTELSENGEGDFRYLGMGDSHIPPPVPSEFNDVSQNTHLRQDHNYCSPTKKNPCEVQPDSLTNNACVRTLNLESPMKTDIFDEFFSSSALNALANDTLDLPHFDEYLFENY

SEQ ID NO: 38045 - protein, 763 aa, Homo sapiens
  REGION 1..763: note = ENSP00000480656
MESPVFAFPLLLKLETHIEKLFLYSFSWDFECSQCGHQYQNRHMKSLVTFTNVIPEWHPLNAAHFGPCNNCNSKSQIRKMVLEKVSPIFMLHFVEGLPQNDLQHYAFHFEGCLYQITSVIQYRANNHFITWILDADGSWLECDDLKGPCSERHKKFEVPASEIHIVIWERKISQVTDKEAACLPLKKTNDQHALSNEKPVSLTSCSVGDAASAETASVTHPKDISVAPRTLSQDTAVTHGDHLLSGPKGLVDNILPLTLEETIQKTASVSQLNSEAFLLENKPVAENTGILKTNTLLSQESLMASSVSAPCNEKLIQDQFVDISFPSQVVNTNMQSVQLNTEDTVNTKSVNNTDATGLIQGVKSVEIEKDAQLKQFLTPKTEQLKPERVTSQVSNLKKKETTADSQTTTSKSLQNQSLKENQKKPFVGSWVKGLISRGASFMPLCVSAHNRNTITDLQPSVKGVNNFGGFKTKGINQKASHVSKKARKSASKPPPISKPPAGPPSSNGTAAHPHAHAASEVLEKSGSTSCGAQLNHSSYGNGISSANHEDLVEGQIHKLRLKLRKKLKAEKKKLAALMSSPQSRTVRSENLEQVPQDGSPNDCESIEDLLNELPYPIDIASESACTTVPGVSLYSSQTHEEILAELLSPTPVSTELSENGEGDFRYLGMGDSHIPPPVPSEFNDVSQNTHLRQDHNYCSPTKKNPCEVQPDSLTNNACVRTLNLESPMKTDIFDEFFSSSALNALANDTLDLPHFDEYLFENY

SEQ ID NO: 38046 - protein, 1347 aa, Homo sapiens
  REGION 1..1347: note = ENSP00000328939
MKSCAVSLTTAAVAFGDEAKKMAEGKASRESEEESVSLTVEEREALGGMDSRLFGFVRLHEDGARTKTLLGKAVRCYESLILKAEGKVESDFFCQLGHFNLLLEDYSKALSAYQRYYSLQADYWKNAAFLYGLGLVYFYYNAFHWAIKAFQDVLYVDPSFCRAKEIHLRLGLMFKVNTDYKSSLKHFQLALIDCNPCTLSNAEIQFHIAHLYETQRKYHSAKEAYEQLLQTENLPAQVKATVLQQLGWMHHNMDLVGDKATKESYAIQYLQKSLEADPNSGQSWYFLGRCYSSIGKVQDAFISYRQSIDKSEASADTWCSIGVLYQQQNQPMDALQAYICAVQLDHGHAAAWMDLGTLYESCNQPQDAIKCYLNAARSKRCSNTSTLAARIKFLQNGSDNWNGGQSLSHHPVQQVYSLCLTPQKLQHLEQLRANRDNLNPAQKHQLEQLESQFVLMQQMRHKEVAQVRTTGIHNGAITDSSLPTNSVSNRQPHGALTRVSSVSQPGVRPACVEKLLSSGAFSAGCIPCGTSKILGSTDTILLGSNCIAGSESNGNVPYLQQNTHTLPHNHTDLNSSTEEPWRKQLSNSAQGLHKSQSSCLSGPNEEQPLFSTGSAQYHQATSTGIKKANEHLTLPSNSVPQGDADSHLSCHTATSGGQQGIMFTKESKPSKNRSLVPETSRHTGDTSNGCADVKGLSNHVHQLIADAVSSPNHGDSPNLLIADNPQLSALLIGKANGNVGTGTCDKVNNIHPAVHTKTDHSVASSPSSAISTATPSPKSTEQRSINSVTSLNSPHSGLHTVNGEGLGKSQSSTKVDLPLASHRSTSQILPSMSVSICPSSTEVLKACRNPGKNGLSNSCILLDKCPPPRPPTSPYPPLPKDKLNPPTPSIYLENKRDAFFPPLHQFCTNPKNPVTVIRGLAGALKLDLGLFSTKTLVEANNEHMVEVRTQLLQPADENWDPTGTKKIWRCESNRSHTTIAKYAQYQASSFQESLREENEKRTQHKDHSDNESTSSENSGRRRKGPFKTIKFGTNIDLSDNKKWKLQLHELTKLPAFARVVSAGNLLTHVGHTILGMNTVQLYMKVPGSRTPGHQENNNFCSVNINIGPGDCEWFVVPEDYWGVLNDFCEKNNLNFLMSSWWPNLEDLYEANVPVYRFIQRPGDLVWINAGTVHWVQAVGWCNNIAWNVGPLTACQYKLAVERYEWNKLKSVKSPVPMVHLSWNMARNIKVSDPKLFEMIKYCLLKILKQYQTLREALVAAGKEVIWHGRTNDEPAHYCSICEVEVFNLLFVTNESNTQKTYIVHCHDCARKTSKSLENFVVLEQYKMEDLIQVYDQFTLALSLSSSS

SEQ ID NO: 38047 - protein, 1211 aa, Homo sapiens
  REGION 1..1211: note = ENSP00000485539
MKSCAVSLTTAAVAFGDEAKKMAEGKASRESEEESVSLTVEEREALGGMDSRLFGFVRLHEDGARTKTLLGKAVRCYESLILKAEGKVESDFFCQLGHFNLLLEDYSKALSAYQRYYSLQADYWKNAAFLYGLGLVYFYYNAFHWAIKAFQDVLYVDPSFCRAKEIHLRLGLMFKVNTDYKSSLKHFQLALIDCNPCTLSNAEIQFHIAHLYETQRKYHSAKEAYEQLLQTENLPAQVKATVLQQLGWMHHNMDLVGDKATKESYAIQYLQKSLEADPNSGQSWYFLGRCYSSIGKVQDAFISYRQSIDKSEASADTWCSIGVLYQQQNQPMDALQAYICAVQLDHGHAAAWMDLGTLYESCNQPQDAIKCYLNAARSKRCSNTSTLAARIKFLQAQLCNLPQSSLQNKTKLLPSIEEAWSLPIPAELTSRQGAMNTAQQNGSDNWNGGQSLSHHPVQQVYSLCLTPQKLQHLEQLRANRDNLNPAQKHQLEQLESQFVLMQQMRHKEVAQGLHKSQSSCLSGPNEEQPLFSTGSAQYHQATSTGIKKANEHLTLPSNSVPQGDADSHLSCHTATSGGQQGIMFTKESKPSKNRSLVPETSRHTGDTSNGCADVKGLSNHVHQLIADAVSSPNHGDSPNLLIADNPQLSALLIGKANGNVGTGTCDKVNNIHPAVHTKTDHSVASSPSSAISTATPSPKSTEQRSINSVTSLNSPHSGLHTVNGEGLGKSQSSTKVDLPLASHRSTSQILPSMSVSICPSSTEVLKACRNPGKNGLSNSCILLDKCPPPRPPTSPYPPLPKDKLNPPTPSIYLENKRDAFFPPLHQFCTNPKNPVTVIRGLAGALKLDLGLFSTKTLVEANNEHMVEVRTQLLQPADENWDPTGTKKIWRCESNRSHTTIAKYAQYQASSFQESLREENEKRTQHKDHSDNESTSSENSGRRRKGPFKTIKFGTNIDLSDNKKWKLQLHELTKLPAFARVVSAGNLLTHVGHTILGMNTVQLYMKVPGSRTPGHQENNNFCSVNINIGPGDCEWFVVPEDYWGVLNDFCEKNNLNFLMSSWWPNLEDLYEANVPVYRFIQRPGDLVWINAGTVHWVQAVGWCNNIAWNVGPLTACQYKLAVERYEWNKLKSVKSPVPMVHLSWNMARNIKVSDPKLFEMIKYCLLKILKQYQTLREALVAAGKEVIWHGRTNDEPAHYCSICEALSLSSSS

SEQ ID NO: 38048 - protein, 1240 aa, Homo sapiens
  REGION 1..1240: note = ENSP00000355420
MKSCAVSLTTAAVAFGDEAKKMAEGKASRESEEESVSLTVEEREALGGMDSRLFGFVRLHEDGARTKTLLGKAVRCYESLILKAEGKVESDFFCQLGHFNLLLEDYSKALSAYQRYYSLQADYWKNAAFLYGLGLVYFYYNAFHWAIKAFQDVLYVDPSFCRAKEIHLRLGLMFKVNTDYKSSLKHFQLALIDCNPCTLSNAEIQFHIAHLYETQRKYHSAKEAYEQLLQTENLPAQVKATVLQQLGWMHHNMDLVGDKATKESYAIQYLQKSLEADPNSGQSWYFLGRCYSSIGKVQDAFISYRQSIDKSEASADTWCSIGVLYQQQNQPMDALQAYICAVQLDHGHAAAWMDLGTLYESCNQPQDAIKCYLNAARSKRCSNTSTLAARIKFLQNGSDNWNGGQSLSHHPVQQVYSLCLTPQKLQHLEQLRANRDNLNPAQKHQLEQLESQFVLMQQMRHKEVAQVRTTGIHNGAITDSSLPTNSVSNRQPHGALTRVSSVSQPGVRPACVEKLLSSGAFSAGCIPCGTSKILGSTDTILLGSNCIAGSESNGNVPYLQQNTHTLPHNHTDLNSSTEEPWRKQLSNSAQGLHKSQSSCLSGPNEEQPLFSTGSAQYHQATSTGIKKANEHLTLPSNSVPQGDADSHLSCHTATSGGQQGIMFTKESKPSKNRSLVPETSRHTGDTSNGCADVKGLSNHVHQLIADAVSSPNHGDSPNLLIADNPQLSALLIGKANGNVGTGTCDKVNNIHPAVHTKTDHSVASSPSSAISTATPSPKSTEQRSINSVTSLNSPHSGLHTVNGEGLGKSQSSTKVDLPLASHRSTSQILPSMSVSICPSSTEVLKACRNPGKNGLSNSCILLDKCPPPRPPTSPYPPLPKDKLNPPTPSIYLENKRDAFFPPLHQFCTNPKNPVTVIRGLAGALKLDLGLFSTKTLVEANNEHMVEVRTQLLQPADENWDPTGTKKIWRCESNRSHTTIAKYAQYQASSFQESLREENEKRTQHKDHSDNESTSSENSGRRRKGPFKTIKFGTNIDLSDNKKWKLQLHELTKLPAFARVVSAGNLLTHVGHTILGMNTVQLYMKVPGSRTPGHQENNNFCSVNINIGPGDCEWFVVPEDYWGVLNDFCEKNNLNFLMSSWWPNLEDLYEANVPVYRFIQRPGDLVWINAGTVHWVQAVGWCNNIAWNVGPLTACQYKLAVERYEWNKLKSVKSPVPMVHLSWNMARNIKVSDPKLFEMIK

SEQ ID NO: 38049 - protein, 1079 aa, Homo sapiens
  REGION 1..1079: note = ENSP00000330446
MKSCAVSLTTAAVAFGDEAKKMAEGKASRESEEESVSLTVEEREALGGMDSRLFGFVRLHEDGARTKTLLGKAVRCYESLILKAEGKVESDFFCQLGHFNLLLEDYSKALSAYQRYYSLQADYWKNAAFLYGLGLVYFYYNAFHWAIKAFQDVLYVDPSFCRAKEIHLRLGLMFKVNTDYKSSLKHFQLALIDCNPCTLSNAEIQFHIAHLYETQRKYHSAKEAYEQLLQTENLPAQVKATVLQQLGWMHHNMDLVGDKATKESYAIQYLQKSLEADPNSGQSWYFLGRCYSSIGKVQDAFISYRQSIDKSEASADTWCSIGVLYQQQNQPMDALQAYICAVQLDHGHAAAWMDLGTLYESCNQPQDAIKCYLNAARSKRCSNTSTLAARIKFLQNGSDNWNGGQSLSHHPVQQVYSLCLTPQKLQHLEQLRANRDNLNPAQKHQLEQLESQFVLMQQMRHKEVAQVRTTGIHNGAITDSSLPTNSVSNRQPHGALTRVSSVSQPGVRPACVEKLLSSGAFSAGCIPCGTSKILGSTDTILLGSNCIAGSESNGNVPYLQQNTHTLPHNHTDLNSSTEEPWRKQLSNSAQGLHKSQSSCLSGPNEEQPLFSTGSAQYHQATSTGIKKANEHLTLPSNSVPQGDADSHLSCHTATSGGQQGIMFTKESKPSKNRSLVPETSRHTGDTSNGCADVKGLSNHVHQLIADAVSSPNHGDSPNLLIADNPQLSALLIGKANGNVGTGTCDKVNNIHPAVHTKTDHSVASSPSSAISTATPSPKSTEQRSINSVTSLNSPHSGLHTVNGEGLGKSQSSTKVDLPLASHRSTSQILPSMSVSICPSSTEVLKACRNPGKNGLSNSCILLDKCPPPRPPTSPYPPLPKDKLNPPTPSIYLENKRDAFFPPLHQFCTNPKNPVTVIRGLAGALKLDLGLFSTKTLVEANNEHMVEVRTQLLQPADENWDPTGTKKIWRCESNRSHTTIAKYAQYQASSFQESLRAGMQWCDLSSLQPPPPGFKRFSHLSLPNSWNYRHLPSCPTNFCIFVETGFHHVGQACLELLTSGGLLASASQSAGITGVSHHAR

SEQ ID NO: 38050 - protein, 207 aa, Homo sapiens
  REGION 1..207: note = ENSP00000372349
MKSCAVSLTTAAVAFGDEAKKMAEGKASRESEEESVSLTVEEREALGGMDSRLFGFVRLHEDGARTKTLLGKAVRCYESLILKAEGKVESDFFCQLGHFNLLLEDYSKALSAYQRYYSLQADYWKNAAFLYGLGLVYFYYNAFHWAIKAFQDVLYVDPSFCRAKEIHLRLGLMFKVNTDYKSSLKHFQLALIDCNPCTLSNAESKYF

SEQ ID NO: 38051 - protein, 1363 aa, Homo sapiens
  REGION 1..1363: note = ENSP00000445274
MKSCAVSLTTAAVAFGDEAKKMAEGKASRESEEESVSLTVEEREALGGMDSRLFGFVRLHEDGARTKTLLGKAVRCYESLILKAEGKVESDFFCQLGHFNLLLEDYSKALSAYQRYYSLQADYWKNAAFLYGLGLVYFYYNAFHWAIKAFQDVLYVDPSFCRAKEIHLRLGLMFKVNTDYKSSLKHFQLALIDCNPCTLSNAEIQFHIAHLYETQRKYHSAKEAYEQLLQTENLPAQVKATVLQQLGWMHHNMDLVGDKATKESYAIQYLQKSLEADPNSGQSWYFLGRCYSSIGKVQDAFISYRQSIDKSEASADTWCSIGVLYQQQNQPMDALQAYICAVQLDHGHAAAWMDLGTLYESCNQPQDAIKCYLNAARSKRCSNTSTLAARIKFLQNGSDNWNGGQSLSHHPVQQVYSLCLTPQKLQHLEQLRANRDNLNPAQKHQLEQLESQFVLMQQMRHKEVAQVRTTGIHNGAITDSSLPTNSVSNRQPHGALTRVSSVSQPGVRPACVEKLLSSGAFSAGCIPCGTSKILGSTDTILLGSNCIAGSESNGNVPYLQQNTHTLPHNHTDLNSSTEEPWRKQLSNSAQAYLGHLTGFIQDNCNKGLHKSQSSCLSGPNEEQPLFSTGSAQYHQATSTGIKKANEHLTLPSNSVPQGDADSHLSCHTATSGGQQGIMFTKESKPSKNRSLVPETSRHTGDTSNGCADVKGLSNHVHQLIADAVSSPNHGDSPNLLIADNPQLSALLIGKANGNVGTGTCDKVNNIHPAVHTKTDHSVASSPSSAISTATPSPKSTEQRSINSVTSLNSPHSGLHTVNGEGLGKSQSSTKVDLPLASHRSTSQILPSMSVSICPSSTEVLKACRNPGKNGLSNSCILLDKCPPPRPPTSPYPPLPKDKLNPPTPSIYLENKRDAFFPPLHQFCTNPKNPVTVIRGLAGALKLDLGLFSTKTLVEANNEHMVEVRTQLLQPADENWDPTGTKKIWRCESNRSHTTIAKYAQYQASSFQESLREENEKRTQHKDHSDNESTSSENSGRRRKGPFKTIKFGTNIDLSDNKKWKLQLHELTKLPAFARVVSAGNLLTHVGHTILGMNTVQLYMKVPGSRTPGHQENNNFCSVNINIGPGDCEWFVVPEDYWGVLNDFCEKNNLNFLMSSWWPNLEDLYEANVPVYRFIQRPGDLVWINAGTVHWVQAVGWCNNIAWNVGPLTACQYKLAVERYEWNKLKSVKSPVPMVHLSWNMARNIKVSDPKLFEMIKYCLLKILKQYQTLREALVAAGKEVIWHGRTNDEPAHYCSICEVEVFNLLFVTNESNTQKTYIVHCHDCARKTSKSLENFVVLEQYKMEDLIQVYDQFTLALSLSSSS

SEQ ID NO: 38052 - protein, 1389 aa, Homo sapiens
  REGION 1..1389: note = ENSP00000441943
MKSCAVSLTTAAVAFGDEAKKMAEGKASRESEEESVSLTVEEREALGGMDSRLFGFVRLHEDGARTKTLLGKAVRCYESLILKAEGKVESDFFCQLGHFNLLLEDYSKALSAYQRYYSLQADYWKNAAFLYGLGLVYFYYNAFHWAIKAFQDVLYVDPSFCRAKEIHLRLGLMFKVNTDYKSSLKHFQLALIDCNPCTLSNAEIQFHIAHLYETQRKYHSAKEAYEQLLQTENLPAQVKATVLQQLGWMHHNMDLVGDKATKESYAIQYLQKSLEADPNSGQSWYFLGSVLYQQQNQPMDALQAYICAVQLDHGHAAAWMDLGTLYESCNQPQDAIKCYLNAARSKRCSNTSTLAARIKFLQAQLCNLPQSSLQNKTKLLPSIEEAWSLPIPAELTSRQGAMNTAQQQSLSLHMITSSQVEGLSSPAKKKRTSSPTKNGSDNWNGGQSLSHHPVQQVYSLCLTPQKLQHLEQLRANRDNLNPAQKHQLEQLESQFVLMQQMRHKEVAQVRTTGIHNGAITDSSLPTNSVSNRQPHGALTRVSSVSQPGVRPACVEKLLSSGAFSAGCIPCGTSKILGSTDTILLGSNCIAGSESNGNVPYLQQNTHTLPHNHTDLNSSTEEPWRKQLSNSAQGLHKSQSSCLSGPNEEQPLFSTGSAQYHQATSTGIKKANEHLTLPSNSVPQGDADSHLSCHTATSGGQQGIMFTKESKPSKNRSLVPETSRHTGDTSNGCADVKGLSNHVHQLIADAVSSPNHGDSPNLLIADNPQLSALLIGKANGNVGTGTCDKVNNIHPAVHTKTDHSVASSPSSAISTATPSPKSTEQRSINSVTSLNSPHSGLHTVNGEGLGKSQSSTKVDLPLASHRSTSQILPSMSVSICPSSTEVLKACRNPGKNGLSNSCILLDKCPPPRPPTSPYPPLPKDKLNPPTPSIYLENKRDAFFPPLHQFCTNPKNPVTVIRGLAGALKLDLGLFSTKTLVEANNEHMVEVRTQLLQPADENWDPTGTKKIWRCESNRSHTTIAKYAQYQASSFQESLREENEKRTQHKDHSDNESTSSENSGRRRKGPFKTIKFGTNIDLSDNKKWKLQLHELTKLPAFARVVSAGNLLTHVGHTILGMNTVQLYMKVPGSRTPGHQENNNFCSVNINIGPGDCEWFVVPEDYWGVLNDFCEKNNLNFLMSSWWPNLEDLYEANVPVYRFIQRPGDLVWINAGTVHWVQAVGWCNNIAWNVGPLTACQYKLAVERYEWNKLKSVKSPVPMVHLSWNMARNIKVSDPKLFEMIKYCLLKILKQYQTLREALVAAGKEVIWHGRTNDEPAHYCSICEVEVFNLLFVTNESNTQKTYIVHCHDCARKTSKSLENFVVLEQYKMEDLIQVYDQFTLALSLSSSS

SEQ ID NO: 38053 - protein, 1392 aa, Homo sapiens
  REGION 1..1392: note = ENSP00000372352
MKSCAVSLTTAAVAFGDEAKKMAEGKASRESEEESVSLTVEEREALGGMDSRLFGFVRLHEDGARTKTLLGKAVRCYESLILKAEGKVESDFFCQLGHFNLLLEDYSKALSAYQRYYSLQADYWKNAAFLYGLGLVYFYYNAFHWAIKAFQDVLYVDPSFCRAKEIHLRLGLMFKVNTDYKSSLKHFQLALIDCNPCTLSNAEIQFHIAHLYETQRKYHSAKEAYEQLLQTENLPAQVKATVLQQLGWMHHNMDLVGDKATKESYAIQYLQKSLEADPNSGQSWYFLGRCYSSIGKVQDAFISYRQSIDKSEASADTWCSIGVLYQQQNQPMDALQAYICAVQLDHGHAAAWMDLGTLYESCNQPQDAIKCYLNAARSKRCSNTSTLAARIKFLQAQLCNLPQSSLQNKTKLLPSIEEAWSLPIPAELTSRQGAMNTAQQNGSDNWNGGQSLSHHPVQQVYSLCLTPQKLQHLEQLRANRDNLNPAQKHQLEQLESQFVLMQQMRHKEVAQVRTTGIHNGAITDSSLPTNSVSNRQPHGALTRVSSVSQPGVRPACVEKLLSSGAFSAGCIPCGTSKILGSTDTILLGSNCIAGSESNGNVPYLQQNTHTLPHNHTDLNSSTEEPWRKQLSNSAQGLHKSQSSCLSGPNEEQPLFSTGSAQYHQATSTGIKKANEHLTLPSNSVPQGDADSHLSCHTATSGGQQGIMFTKESKPSKNRSLVPETSRHTGDTSNGCADVKGLSNHVHQLIADAVSSPNHGDSPNLLIADNPQLSALLIGKANGNVGTGTCDKVNNIHPAVHTKTDHSVASSPSSAISTATPSPKSTEQRSINSVTSLNSPHSGLHTVNGEGLGKSQSSTKVDLPLASHRSTSQILPSMSVSICPSSTEVLKACRNPGKNGLSNSCILLDKCPPPRPPTSPYPPLPKDKLNPPTPSIYLENKRDAFFPPLHQFCTNPKNPVTVIRGLAGALKLDLGLFSTKTLVEANNEHMVEVRTQLLQPADENWDPTGTKKIWRCESNRSHTTIAKYAQYQASSFQESLREENEKRTQHKDHSDNESTSSENSGRRRKGPFKTIKFGTNIDLSDNKKWKLQLHELTKLPAFARVVSAGNLLTHVGHTILGMNTVQLYMKVPGSRTPGHQENNNFCSVNINIGPGDCEWFVVPEDYWGVLNDFCEKNNLNFLMSSWWPNLEDLYEANVPVYRFIQRPGDLVWINAGTVHWVQAVGWCNNIAWNVGPLTACQYKLAVERYEWNKLKSVKSPVPMVHLSWNMARNIKVSDPKLFEMIKYCLLKILKQYQTLREALVAAGKEVIWHGRTNDEPAHYCSICEVEVFNLLFVTNESNTQKTYIVHCHDCARKTSKSLENFVVLEQYKMEDLIQVYDQFTLALSLSSSS

SEQ ID NO: 38054 - protein, 1335 aa, Homo sapiens
  REGION 1..1335: note = ENSP00000439922
MKSCAVSLTTAAVAFGDEAKKMAEGKASRESEEESVSLTVEEREALGGMDSRLFGFVRLHEDGARTKTLLGKAVRCYESLILKAEGKVESDFFCQLGHFNLLLEDYSKALSAYQRYYSLQADYWKNAAFLYGLGLVYFYYNAFHWAIKAFQDVLYVDPSFCRAKEIHLRLGLMFKVNTDYKSSLKHFQLALIDCNPCTLSNAEIQFHIAHLYETQRKYHSAKEAYEQLLQTENLPAQVKATVLQQLGWMHHNMDLVGDKATKESYAIQYLQKSLEADPNSGQSWYFLGRCYSSIGKVQDAFISYRQSIDKSEASADTWCSIGVLYQQQNQPMDALQAYICAVQLDHGHAAAWMDLGTLYESCNQPQDAIKCYLNAARSKRCSNTSTLAARIKFLQAQLCNLPQSSLQNKTKLLPSIEEAWSLPIPAELTSRQGAMNTAQQNGSDNWNGGQSLSHHPVQQVYSLCLTPQKLQHLEQLRANRDNLNPAQKHQLEQLESQFVLMQQMRHKEVAQVRTTGIHNGAITDSSLPTNSVSNRQPHGALTRVSSVSQPGVRPACVEKLLSSGAFSAGCIPCGTSKILGSTDTILLGSNCIAGSESNGNVPYLQQNTHTLPHNHTDLNSSTEEPWRKQLSNSAQGLHKSQSSCLSGPNEEQPLFSTGSAQYHQATSTGIKKANEHLTLPSNSVPQGDADSHLSCHTATSGGQQGIMFTKESKPSKNRSLVPETSRHTGDTSNGCADVKGLSNHVHQLIADAVSSPNHGDSPNLLIADNPQLSALLIGKANGNVGTGTCDKVNNIHPAVHTKTDHSVASSPSSAISTATPSPKSTEQRSINSVTSLNSPHSGLHTVNGEGLGKSQSSTKVDLPLASHRSTSQILPSMSVSICPSSTEVLKACRNPGKNGLSNSCILLDKCPPPRPPTSPYPPLPKDKLNPPTPSIYLENKRDAFFPPLHQFCTNPKNPVTVIRGLAGALKLDLGLFSTKTLVEANNEHMVEVRTQLLQPADENWDPTGTKKIWRCESNRSHTTIAKYAQYQASSFQESLREENEKRTQHKDHSDNESTSSENSGRRRKGPFKTIKFGTNIDLSDNKKWKLQLHELTKLPAFARVVSAGNLLTHVGHTILGMNTVQLYMKVPGSRTPGHQENNNFCSVNINIGPGDCEWFVVPEDYWGVLNDFCEKNNLNFLMSSWWPNLEDLYEANVPVYRFIQRPGDLVWINAGTVHWVQAVGWCNNIAWNVGPLTACQYKLAVERYEWNKLKSVKSPVPMVHLSWNMARNIKVSDPKLFEMIKYCLLKILKQYQTLREALVAAGKEVIWHGRTNDEPAHYCSICEALSLSSSS

SEQ ID NO: 38055 - protein, 1444 aa, Homo sapiens
  REGION 1..1444: note = ENSP00000442047
MKSCAVSLTTAAVAFGDEAKKMAEGKASRESEEESVSLTVEEREALGGMDSRLFGFVRLHEDGARTKTLLGKAVRCYESLILKAEGKVESDFFCQLGHFNLLLEDYSKALSAYQRYYSLQADYWKNAAFLYGLGLVYFYYNAFHWAIKAFQDVLYVDPSFCRAKEIHLRLGLMFKVNTDYKSSLKHFQLALIDCNPCTLSNAEIQFHIAHLYETQRKYHSAKEAYEQLLQTENLPAQVKATVLQQLGWMHHNMDLVGDKATKESYAIQYLQKSLEADPNSGQSWYFLGRCYSSIGKVQDAFISYRQSIDKSEASADTWCSIGVLYQQQNQPMDALQAYICAVQLDHGHAAAWMDLGTLYESCNQPQDAIKCYLNAARSKRCSNTSTLAARIKFLQAQLCNLPQSSLQNKTKLLPSIEEAWSLPIPAELTSRQGAMNTAQQAYRAHDPNTEHVLNHSQTPILQQSLSLHMITSSQVEGLSSPAKKKRTSSPTKNGSDNWNGGQSLSHHPVQQVYSLCLTPQKLQHLEQLRANRDNLNPAQKHQLEQLESQFVLMQQMRHKEVAQVRTTGIHNGAITDSSLPTNSVSNRQPHGALTRVSSVSQPGVRPACVEKLLSSGAFSAGCIPCGTSKILGSTDTILLGSNCIAGSESNGNVPYLQQNTHTLPHNHTDLNSSTEEPWRKQLSNSAQGLHKSQSSCLSGPNEEQPLFSTGSAQYHQATSTGIKKANEHLTLPSNSVPQGDADSHLSCHTATSGGQQGIMFTKESKPSKNRSLVPETSRHTGDTSNGCADVKGLSNHVHQLIADAVSSPNHGDSPNLLIADNPQLSALLIGKANGNVGTGTCDKVNNIHPAVHTKTDHSVASSPSSAISTATPSPKSTEQRSINSVTSLNSPHSGLHTVNGEGLGKSQSSTKVDLPLASHRSTSQILPSMSVSICPSSTEVLKACRNPGKNGLSNSCILLDKCPPPRPPTSPYPPLPKDKLNPPTPSIYLENKRDAFFPPLHQFCTNPKNPVTVIRGLAGALKLDLGLFSTKTLVEANNEHMVEVRTQLLQPADENWDPTGTKKIWRCESNRSHTTIAKYAQYQASSFQESLREENEKRTQHKDHSDNESTSSENSGRRRKGPFKTIKFGTNIDLSDNKKWKLQLHELTKLPAFARVVSAGNLLTHVGHTILGMNTVQLYMKVPGSRTPGHQENNNFCSVNINIGPGDCEWFVVPEDYWGVLNDFCEKNNLNFLMSSWWPNLEDLYEANVPVYRFIQRPGDLVWINAGTVHWVQAVGWCNNIAWNVGPLTACQYKLAVERYEWNKLKSVKSPVPMVHLSWNMARNIKVSDPKLFEMIKYCLLKILKQYQTLREALVAAGKEVIWHGRTNDEPAHYCSICEVEVFNLLFVTNESNTQKTYIVHCHDCARKTSKSLENFVVLEQYKMEDLIQVYDQFTLALSLSSSS

SEQ ID NO: 38056 - protein, 1399 aa, Homo sapiens
  REGION 1..1399: note = ENSP00000483735
MKSCAVSLTTAAVAFGDEAKKMAEGKASRESEEESVSLTVEEREALGGMDSRLFGFVRLHEDGARTKTLLGKAVRCYESLILKAEGKVESDFFCQLGHFNLLLEDYSKALSAYQRYYSLQADYWKNAAFLYGLGLVYFYYNAFHWAIKAFQDVLYVDPSFCRAKEIHLRLGLMFKVNTDYKSSLKHFQLALIDCNPCTLSNAEIQFHIAHLYETQRKYHSAKEAYEQLLQTENLPAQVKATVLQQLGWMHHNMDLVGDKATKESYAIQYLQKSLEADPNSGQSWYFLGRCYSSIGKVQDAFISYRQSIDKSEASADTWCSIGVLYQQQNQPMDALQAYICAVQLDHGHAAAWMDLGTLYESCNQPQDAIKCYLNAARSKRCSNTSTLAARIKFLQAYRAHDPNTEHVLNHSQTPILQQSLSLHMITSSQVEGLSSPAKKKRTSSPTKNGSDNWNGGQSLSHHPVQQVYSLCLTPQKLQHLEQLRANRDNLNPAQKHQLEQLESQFVLMQQMRHKEVAQVRTTGIHNGAITDSSLPTNSVSNRQPHGALTRVSSVSQPGVRPACVEKLLSSGAFSAGCIPCGTSKILGSTDTILLGSNCIAGSESNGNVPYLQQNTHTLPHNHTDLNSSTEEPWRKQLSNSAQGLHKSQSSCLSGPNEEQPLFSTGSAQYHQATSTGIKKANEHLTLPSNSVPQGDADSHLSCHTATSGGQQGIMFTKESKPSKNRSLVPETSRHTGDTSNGCADVKGLSNHVHQLIADAVSSPNHGDSPNLLIADNPQLSALLIGKANGNVGTGTCDKVNNIHPAVHTKTDHSVASSPSSAISTATPSPKSTEQRSINSVTSLNSPHSGLHTVNGEGLGKSQSSTKVDLPLASHRSTSQILPSMSVSICPSSTEVLKACRNPGKNGLSNSCILLDKCPPPRPPTSPYPPLPKDKLNPPTPSIYLENKRDAFFPPLHQFCTNPKNPVTVIRGLAGALKLDLGLFSTKTLVEANNEHMVEVRTQLLQPADENWDPTGTKKIWRCESNRSHTTIAKYAQYQASSFQESLREENEKRTQHKDHSDNESTSSENSGRRRKGPFKTIKFGTNIDLSDNKKWKLQLHELTKLPAFARVVSAGNLLTHVGHTILGMNTVQLYMKVPGSRTPGHQENNNFCSVNINIGPGDCEWFVVPEDYWGVLNDFCEKNNLNFLMSSWWPNLEDLYEANVPVYRFIQRPGDLVWINAGTVHWVQAVGWCNNIAWNVGPLTACQYKLAVERYEWNKLKSVKSPVPMVHLSWNMARNIKVSDPKLFEMIKYCLLKILKQYQTLREALVAAGKEVIWHGRTNDEPAHYCSICEVEVFNLLFVTNESNTQKTYIVHCHDCARKTSKSLENFVVLEQYKMEDLIQVYDQFTLALSLSSSS

SEQ ID NO: 38057 - protein, 1264 aa, Homo sapiens
  REGION 1..1264: note = ENSP00000484698
MKSCAVSLTTAAVAFGDEAKKMAEGKASRESEEESVSLTVEEREALGGMDSRLFGFVRLHEDGARTKTLLGKNAAFLYGLGLVYFYYNAFHWAIKAFQDVLYVDPSFCRAKEIHLRLGLMFKVNTDYKSSLKRKYHSAKEAYEQLLQTENLPAQVKATVLQQLGWMHHNMDLVGDKATKESYAIQYLQKSLEADPNSGQSWYFLGRCYSSIGKVQDAFISYRQSIDKSEASADTWCSIGVLYQQQNQPMDALQAYICAVQLDHGHAAAWMDLGTLYESCNQPQDAIKCYLNAARSKRCSNTSTLAARIKFLQNGSDNWNGGQSLSHHPVQQVYSLCLTPQKLQHLEQLRANRDNLNPAQKHQLEQLESQFVLMQQMRHKEVAQVRTTGIHNGAITDSSLPTNSVSNRQPHGALTRVSSVSQPGVRPACVEKLLSSGAFSAGCIPCGTSKILGSTDTILLGSNCIAGSESNGNVPYLQQNTHTLPHNHTDLNSSTEEPWRKQLSNSAQGLHKSQSSCLSGPNEEQPLFSTGSAQYHQATSTGIKKANEHLTLPSNSVPQGDADSHLSCHTATSGGQQGIMFTKESKPSKNRSLVPETSRHTGDTSNGCADVKGLSNHVHQLIADAVSSPNHGDSPNLLIADNPQLSALLIGKANGNVGTGTCDKVNNIHPAVHTKTDHSVASSPSSAISTATPSPKSTEQRSINSVTSLNSPHSGLHTVNGEGLGKSQSSTKVDLPLASHRSTSQILPSMSVSICPSSTEVLKACRNPGKNGLSNSCILLDKCPPPRPPTSPYPPLPKDKLNPPTPSIYLENKRDAFFPPLHQFCTNPKNPVTVIRGLAGALKLDLGLFSTKTLVEANNEHMVEVRTQLLQPADENWDPTGTKKIWRCESNRSHTTIAKYAQYQASSFQESLREENEKRTQHKDHSDNESTSSENSGRRRKGPFKTIKFGTNIDLSDNKKWKLQLHELTKLPAFARVVSAGNLLTHVGHTILGMNTVQLYMKVPGSRTPGHQENNNFCSVNINIGPGDCEWFVVPEDYWGVLNDFCEKNNLNFLMSSWWPNLEDLYEANVPVYRFIQRPGDLVWINAGTVHWVQAVGWCNNIAWNVGPLTACQYKLAVERYEWNKLKSVKSPVPMVHLSWNMARNIKVSDPKLFEMIKYCLLKILKQYQTLREALVAAGKEVIWHGRTNDEPAHYCSICEVEVFNLLFVTNESNTQKTYIVHCHDCARKTSKSLENFVVLEQYKMEDLIQVYDQFTLALSLSSSS

SEQ ID NO: 38058 - protein, 1367 aa, Homo sapiens
  REGION 1..1367: note = ENSP00000485013
MKSCAVSLTTAAVAFGDEAKKMAEGKASRESEEESVSLTVEEREALGGMDSRLFGFVRLHEDGARTKTLLGKAVRCYESLILKAEGKVESDFFCQLGHFNLLLEDYSKALSAYQRYYSLQADYWKNAAFLYGLGLVYFYYNAFHWAIKAFQDVLYVDPSFCRAKEIHLRLGLMFKVNTDYKSSLKHFQLALIDCNPCTLSNAEIQFHIAHLYETQRKYHSAKEAYEQLLQTENLPAQVKATVLQQLGWMHHNMDLVGDKATKESYAIQYLQKSLEADPNSGQSWYFLGRCYSSIGKVQDAFISYRQSIDKSEASADTWCSIGVLYQQQNQPMDALQAYICAVQLDHGHAAAWMDLGTLYESCNQPQDAIKCYLNAARSKRCSNTSTLAARIKFLQAQLCNLPQSSLQNKTKLLPSIEEAWSLPIPAELTSRQGAMNTAQQNGSDNWNGGQSLSHHPVQQVYSLCLTPQKLQHLEQLRANRDNLNPAQKHQLEQLESQFVLMQQMRHKEVAQVRTTGIHNGAITDSSLPTNSVSNRQPHGALTRVSSVSQPGVRPACVEKLLSSGAFSAGCIPCGTSKILGSTDTILLGSNCIAGSESNGNVPYLQQNTHTLPHNHTDLNSSTEEPWRKQLSNSAQGLHKSQSSCLSGPNEEQPLFSTGSAQYHQATSTGIKKANEHLTLPSNSVPQGDADSHLSCHTATSGGQQGIMFTKESKPSKNRSLVPETSRHTGDTSNGCADVKGLSNHVHQLIADAVSSPNHGDSPNLLIADNPQLSALLIGKANGNVGTGTCDKVNNIHPAVHTKTDHSVASSPSSAISTATPSPKSTEQRSINSVTSLNSPHSGLHTVNGEGLGKSQSSTKVDLPLASHRSTSQILPSMSVSICPSSTEVLKACRNPGKNGLSNSCILLDKCPPPRPPTSPYPPLPKDKLNPPTPSIYLENKRDAFFPPLHQFCTNPKNPVTVIRGLAGALKLDLGLFSTKTLVEANNEHMVEVRTQLLQPADENWDPTGTKKIWRCESNRSHTTIAKYAQYQASSFQESLREENEKRTQHKDHSDNESTSSEKWKLQLHELTKLPAFARVVSAGNLLTHVGHTILGMNTVQLYMKVPGSRTPGHQENNNFCSVNINIGPGDCEWFVVPEDYWGVLNDFCEKNNLNFLMSSWWPNLEDLYEANVPVYRFIQRPGDLVWINAGTVHWVQAVGWCNNIAWNVGPLTACQYKLAVERYEWNKLKSVKSPVPMVHLSWNMARNIKVSDPKLFEMIKYCLLKILKQYQTLREALVAAGKEVIWHGRTNDEPAHYCSICEVEVFNLLFVTNESNTQKTYIVHCHDCARKTSKSLENFVVLEQYKMEDLIQVYDQFTLALSLSSSS

SEQ ID NO: 38059 - protein, 532 aa, Homo sapiens
  REGION 1..532: note = ENSP00000363229
MESAEPAGQARAAATKLSEAVGAALQEPRRQRRLVLVIVCVALLLDNMLYMVIVPIVPDYIAHMRGGGEGPTRTPEVWEPTLPLPTPANASAYTANTSASPTAAWPAGSALRPRYPTESEDVKIGVLFASKAILQLLVNPLSGPFIDRMSYDVPLLIGLGVMFASTVLFAFAEDYATLFAARSLQGLGSAFADTSGIAMIADKYPEEPERSRALGVALAFISFGSLVAPPFGGILYEFAGKRVPFLVLAAVSLFDALLLLAVAKPFSAAARARANLPVGTPIHRLMLDPYIAVVAGALTTCNIPLAFLEPTIATWMKHTMAASEWEMGMAWLPAFVPHVLGVYLTVRLAARYPHLQWLYGALGLAVIGASSCIVPACRSFAPLVVSLCGLCFGIALVDTALLPTLAFLVDVRHVSVYGSVYAIADISYSVAYALGPIVAGHIVHSLGFEQLSLGMGLANLLYAPVLLLLRNVGLLTRSRSERDVLLDEPPQGLYDAVRLRERPVSGQDGEPRSPPGPFDACEDDYNYYYTRS

SEQ ID NO: 38060 - protein, 116 aa, Homo sapiens
  REGION 1..116: note = ENSP00000383702
MSAPAQPPAEGTEGTAPGGGPPGPPPNMTSNRRLQQTQAQVEEVVDIIRVNVDKVLERDQKLSELDDRADALQAGASQFESSAAKLKRKYWWKNCKMMIMLGAICAIIVVVIVRRD

SEQ ID NO: 38061 - protein, 117 aa, Homo sapiens
  REGION 1..117: note = ENSP00000355122
MSAPAQPPAEGTEGTAPGGGPPGPPPNMTSNRRLQQTQAQVEEVVDIIRVNVDKVLERDQKLSELDDRADALQAGASQFESSAAKLKRKYWWKNCKMMIMLGAICAIIVVVIVSKYR

SEQ ID NO: 38062 - protein, 116 aa, Homo sapiens
  REGION 1..116: note = ENSP00000444181
MSAPAQPPAEGTEGTAPGGGPPGPPPNMTSNRRLQQTQAQVEEVVDIIRVNVDKVLERDQKLSELDDRADALQAGASQFESSAAKLKRKYWWKNCKMMIMLGAICAIIVVVIVRRG

SEQ ID NO: 38063 - protein, 118 aa, Homo sapiens
  REGION 1..118: note = ENSP00000379602
MSAPAQPPAEGTEGTAPGGGPPGPPPNMTSNRRLQQTQAQVEEVVDIIRVNVDKVLERDQKLSELDDRADALQAGASQFESSAAKLKRKYWWKNCKMMIMLGAICAIIVVVIVIYFFT

SEQ ID NO: 38064 - protein, 419 aa, Homo sapiens
  REGION 1..419: note = ENSP00000303129
MAKEGVEKAEETEQMIEKEAGKEPAEGGGGDGSHRLGDAQEMRAVVLAGFGGLNKLRLFRKAMPEPQDGELKIRVKACGLNFIDLMVRQGNIDNPPKTPLVPGFECSGIVEALGDSVKGYEIGDRVMAFVNYNAWAEVVCTPVEFVYKIPDDMSFSEAAAFPMNFVTAYVMLFEVANLREGMSVLVHSAGGGVGQAVAQLCSTVPNVTVFGTASTFKHEAIKDSVTHLFDRNADYVQEVKRISAEGVDIVLDCLCGDNTGKGLSLLKPLGTYILYGSSNMVTGETKSFFSFAKSWWQVEKVNPIKLYEENKVIAGFSLLNLLFKQGRAGLIRGVVEKLIGLYNQKKIKPVVDSLWALEEVKEAMQRIHDRGNIGKLILDVEKTPTPLMANDSTETSEAGEEEEDHEGDSENKERMPFIQ

SEQ ID NO: 38065 - protein, 839 aa, Homo sapiens
  REGION 1..839: note = ENSP00000385362
MEQWRQCGRWLIDCKVLPPNHRVVWPSAVVFDLAQALRDGVLLCQLLHNLSPGSIDLKDINFRPQMSQFLCLKNIRTFLKVCHDKFGLRNSELFDPFDLFDVRDFGKVISAVSRLSLHSIAQNKGIRPFPSEETTENDDDVYRSLEELADEHDLGEDIYDCVPCEDGGDDIYEDIIKVEVQQPMKMGMTEDDKRNCCLLEIQETEAKYYRTLEDIEKNYMSPLRLVLSPADMAAVFINLEDLIKVHHSFLRAIDVSVMVGGSTLAKVFLDFKERLLIYGEYCSHMEHAQNTLNQLLASREDFRQKVEECTLKVQDGKFKLQDLLVVPMQRVLKYHLLLKELLSHSAERPERQQLKEALEAMQDLAMYINEVKRDKETLRKISEFQSSIENLQVKLEEFGRPKIDGELKVRSIVNHTKQDRYLFLFDKVVIVCKRKGYSYELKEIIELLFHKMTDDPMNNKDVKKWSYGFYLIHLQGKQGFQFFCKTEDMKRKWMEQFEMAMSNIKPDKANANHHSFQMYTFDKTTNCKACKMFLRGTFYQGYMCTKCGVGAHKECLEVIPPCKFTSPADLDASGAGPGPKMVAMQNYHGNPAPPGKPVLTFQTGDVLELLRGDPESPWWEGRLVQTRKSGYFPSSSVKPCPVDGRPPISRPPSREIDYTAYPWFAGNMERQQTDNLLKSHASGTYLIRERPAEAERFAISIKFNDEVKHIKVVEKDNWIHITEAKKFDSLLELVEYYQCHSLKESFKQLDTTLKYPYKSRERSASRASSRSPVFTPRVIGTAVARYNFAARDMRELSLREGDVVRIYSRIGGDQGWWKGETNGRIGWFPSTYVEEEGIQ

SEQ ID NO: 38066 - protein, 878 aa, Homo sapiens
  REGION 1..878: note = ENSP00000360916
MEQWRQCGRWLIDCKVLPPNHRVVWPSAVVFDLAQALRDGVLLCQLLHNLSPGSIDLKDINFRPQMSQFLCLKNIRTFLKVCHDKFGLRNSELFDPFDLFDVRDFGKVISAVSRLSLHSIAQNKGIRPFPSEETTENDDDVYRSLEELADEHDLGEDIYDCVPCEDGGDDIYEDIIKVEVQQPMIRYMQKMGMTEDDKRNCCLLEIQETEAKYYRTLEDIEKNYMSPLRLVLSPADMAAVFINLEDLIKVHHSFLRAIDVSVMVGGSTLAKVFLDFKERLLIYGEYCSHMEHAQNTLNQLLASREDFRQKVEECTLKVQDGKFKLQDLLVVPMQRVLKYHLLLKELLSHSAERPERQQLKEALEAMQDLAMYINEVKRDKETLRKISEFQSSIENLQVKLEEFGRPKIDGELKVRSIVNHTKQDRYLFLFDKVVIVCKRKGYSYELKEIIELLFHKMTDDPMNNKDVKKSHGKMWSYGFYLIHLQGKQGFQFFCKTEDMKRKWMEQFEMAMSNIKPDKANANHHSFQMYTFDKTTNCKACKMFLRGTFYQGYMCTKCGVGAHKECLEVIPPCKFTSPADLDASGAGPGPKMVAMQNYHGNPAPPGKPVLTFQTGDVLELLRGDPESPWWEGRLVQTRKSGYFPSSSVKPCPVDGRPPISRPPSREIDYTAYPWFAGNMERQQTDNLLKSHASGTYLIRERPAEAERFAISIKFNDEVKHIKVVEKDNWIHITEAKKFDSLLELVEYYQCHSLKESFKQLDTTLKYPYKSRERSASRASSRSPASCASYNFSFLSPQGLSFASQGPSAPFWSVFTPRVIGTAVARYNFAARDMRELSLREGDVVRIYSRIGGDQGWWKGETNGRIGWFPSTYVEEEGIQ

SEQ ID NO: 38067 - protein, 868 aa, Homo sapiens
  REGION 1..868: note = ENSP00000360917
MEQWRQCGRWLIDCKVLPPNHRVVWPSAVVFDLAQALRDGVLLCQLLHNLSPGSIDLKDINFRPQMSQFLCLKNIRTFLKVCHDKFGLRNSELFDPFDLFDVRDFGKVISAVSRLSLHSIAQNKGIRPFPSEETTENDDDVYRSLEELADEHDLGEDIYDCVPCEDGGDDIYEDIIKVEVQQPMKMGMTEDDKRNCCLLEIQETEAKYYRTLEDIEKNYMSPLRLVLSPADMAAVFINLEDLIKVHHSFLRAIDVSVMVGGSTLAKVFLDFKERLLIYGEYCSHMEHAQNTLNQLLASREDFRQKVEECTLKVQDGKFKLQDLLVVPMQRVLKYHLLLKELLSHSAERPERQQLKEALEAMQDLAMYINEVKRDKETLRKISEFQSSIENLQVKLEEFGRPKIDGELKVRSIVNHTKQDRYLFLFDKVVIVCKRKGYSYELKEIIELLFHKMTDDPMNNKDVKKWSYGFYLIHLQGKQGFQFFCKTEDMKRKWMEQFEMAMSNIKPDKANANHHSFQMYTFDKTTNCKACKMFLRGTFYQGYMCTKCGVGAHKECLEVIPPCKFTSPADLDASGAGPGPKMVAMQNYHGNPAPPGKPVLTFQTGDVLELLRGDPESPWWEGRLVQTRKSGYFPSSSVKPCPVDGRPPISRPPSREIDYTAYPWFAGNMERQQTDNLLKSHASGTYLIRERPAEAERFAISIKFNDEVKHIKVVEKDNWIHITEAKKFDSLLELVEYYQCHSLKESFKQLDTTLKYPYKSRERSASRASSRSPASCASYNFSFLSPQGLSFASQGPSAPFWSVFTPRVIGTAVARYNFAARDMRELSLREGDVVRIYSRIGGDQGWWKGETNGRIGWFPSTYVEEEGIQ

SEQ ID NO: 38068 - protein, 290 aa, Homo sapiens
  REGION 1..290: note = ENSP00000234392
MGDGGAERDRGPARRAESGGGGGRCGDRSGAGDLRADGGGHSPTEVAGTSASSPAGSRESGADSDGQPGPGEADHCRRILVRDAKGTIREIVLPKGLDLDRPKRTRTSFTAEQLYRLEMEFQRCQYVVGRERTELARQLNLSETQVKVWFQNRRTKQKKDQSRDLEKRASSSASEAFATSNILRLLEQGRLLSVPRAPSLLALTPSLPGLPASHRGTSLGDPRNSSPRLNPLSSASASPPLPPPLPAVCFSSAPLLDLPAGYELGSSAFEPYSWLERKVGSASSCKKANT

SEQ ID NO: 38069 - protein, 3396 aa, Homo sapiens
  REGION 1..3396: note = ENSP00000265077
MFINIKSILWMCSTLIVTHALHKVKVGKSPPVRGSLSGKVSLPCHFSTMPTLPPSYNTSEFLRIKWSKIEVDKNGKDLKETTVLVAQNGNIKIGQDYKGRVSVPTHPEAVGDASLTVVKLLASDAGLYRCDVMYGIEDTQDTVSLTVDGVVFHYRAATSRYTLNFEAAQKACLDVGAVIATPEQLFAAYEDGFEQCDAGWLADQTVRYPIRAPRVGCYGDKMGKAGVRTYGFRSPQETYDVYCYVDHLDGDVFHLTVPSKFTFEEAAKECENQDARLATVGELQAAWRNGFDQCDYGWLSDASVRHPVTVARAQCGGGLLGVRTLYRFENQTGFPPPDSRFDAYCFKPKEATTIDLSILAETASPSLSKEPQMVSDRTTPIIPLVDELPVIPTEFPPVGNIVSFEQKATVQPQAITDSLATKLPTPTGSTKKPWDMDDYSPSASGPLGKLDISEIKEEVLQSTTGVSHYATDSWDGVVEDKQTQESVTQIEQIEVGPLVTSMEILKHIPSKEFPVTETPLVTARMILESKTEKKMVSTVSELVTTGHYGFTLGEEDDEDRTLTVGSDESTLIFDQIPEVITVSKTSEDTIHTHLEDLESVSASTTVSPLIMPDNNGSSMDDWEERQTSGRITEEFLGKYLSTTPFPSQHRTEIELFPYSGDKILVEGISTVIYPSLQTEMTHRRERTETLIPEMRTDTYTDEIQEEITKSPFMGKTEEEVFSGMKLSTSLSEPIHVTESSVEMTKSFDFPTLITKLSAEPTEVRDMEEDFTATPGTTKYDENITTVLLAHGTLSVEAATVSKWSWDEDNTTSKPLESTEPSASSKLPPALLTTVGMNGKDKDIPSFTEDGADEFTLIPDSTQKQLEEVTDEDIAAHGKFTIRFQPTTSTGIAEKSTLRDSTTEEKVPPITSTEGQVYATMEGSALGEVEDVDLSKPVSTVPQFAHTSEVEGLAFVSYSSTQEPTTYVDSSHTIPLSVIPKTDWGVLVPSVPSEDEVLGEPSQDILVIDQTRLEATISPETMRTTKITEGTTQEEFPWKEQTAEKPVPALSSTAWTPKEAVTPLDEQEGDGSAYTVSEDELLTGSERVPVLETTPVGKIDHSVSYPPGAVTEHKVKTDEVVTLTPRIGPKVSLSPGPEQKYETEGSSTTGFTSSLSPFSTHITQLMEETTTEKTSLEDIDLGSGLFEKPKATELIEFSTIKVTVPSDITTAFSSVDRLHTTSAFKPSSAITKKPPLIDREPGEETTSDMVIIGESTSHVPPTTLEDIVAKETETDIDREYFTTSSPPATQPTRPPTVEDKEAFGPQALSTPQPPASTKFHPDINVYIIEVRENKTGRMSDLSVIGHPIDSESKEDEPCSEETDPVHDLMAEILPEFPDIIEIDLYHSEENEEEEEECANATDVTTTPSVQYINGKHLVTTVPKDPEAAEARRGQFESVAPSQNFSDSSESDTHPFVIAKTELSTAVQPNESTETTESLEVTWKPETYPETSEHFSGGEPDVFPTVPFHEEFESGTAKKGAESVTERDTEVGHQAHEHTEPVSLFPEESSGEIAIDQESQKIAFARATEVTFGEEVEKSTSVTYTPTIVPSSASAYVSEEEAVTLIGNPWPDDLLSTKESWVEATPRQVVELSGSSSIPITEGSGEAEEDEDTMFTMVTDLSQRNTTDTLITLDTSRIITESFFEVPATTIYPVSEQPSAKVVPTKFVSETDTSEWISSTTVEEKKRKEEEGTTGTASTFEVYSSTQRSDQLILPFELESPNVATSSDSGTRKSFMSLTTPTQSEREMTDSTPVFTETNTLENLGAQTTEHSSIHQPGVQEGLTTLPRSPASVFMEQGSGEAAADPETTTVSSFSLNVEYAIQAEKEVAGTLSPHVETTFSTEPTGLVLSTVMDRVVAENITQTSREIVISERLGEPNYGAEIRGFSTGFPLEEDFSGDFREYSTVSHPIAKEETVMMEGSGDAAFRDTQTSPSTVPTSVHISHISDSEGPSSTMVSTSAFPWEEFTSSAEGSGEQLVTVSSSVVPVLPSAVQKFSGTASSIIDEGLGEVGTVNEIDRRSTILPTAEVEGTKAPVEKEEVKVSGTVSTNFPQTIEPAKLWSRQEVNPVRQEIESETTSEEQIQEEKSFESPQNSPATEQTIFDSQTFTETELKTTDYSVLTTKKTYSDDKEMKEEDTSLVNMSTPDPDANGLESYTTLPEATEKSHFFLATALVTESIPAEHVVTDSPIKKEESTKHFPKGMRPTIQESDTELLFSGLGSGEEVLPTLPTESVNFTEVEQINNTLYPHTSQVESTSSDKIEDFNRMENVAKEVGPLVSQTDIFEGSGSVTSTTLIEILSDTGAEGPTVAPLPFSTDIGHPQNQTVRWAEEIQTSRPQTITEQDSNKNSSTAEINETTTSSTDFLARAYGFEMAKEFVTSAPKPSDLYYEPSGEGSGEVDIVDSFHTSATTQATRQESSTTFVSDGSLEKHPEVPSAKAVTADGFPTVSVMLPLHSEQNKSSPDPTSTLSNTVSYERSTDGSFQDRFREFEDSTLKPNRKKPTENIIIDLDKEDKDLILTITESTILEILPELTSDKNTIIDIDHTKPVYEDILGMQTDIDTEVPSEPHDSNDESNDDSTQVQEIYEAAVNLSLTEETFEGSADVLASYTQATHDESMTYEDRSQLDHMGFHFTTGIPAPSTETELDVLLPTATSLPIPRKSATVIPEIEGIKAEAKALDDMFESSTLSDGQAIADQSEIIPTLGQFERTQEEYEDKKHAGPSFQPEFSSGAEEALVDHTPYLSIATTHLMDQSVTEVPDVMEGSNPPYYTDTTLAVSTFAKLSSQTPSSPLTIYSGSEASGHTEIPQPSALPGIDVGSSVMSPQDSFKEIHVNIEATFKPSSEEYLHITEPPSLSPDTKLEPSEDDGKPELLEEMEASPTELIAVEGTEILQDFQNKTDGQVSGEAIKMFPTIKTPEAGTVITTADEIELEGATQWPHSTSASATYGVEAGVVPWLSPQTSERPTLSSSPEINPETQAALIRGQDSTIAASEQQVAARILDSNDQATVNPVEFNTEVATPPFSLLETSNETDFLIGINEESVEGTAIYLPGPDRCKMNPCLNGGTCYPTETSYVCTCVPGYSGDQCELDFDECHSNPCRNGATCVDGFNTFRCLCLPSYVGALCEQDTETCDYGWHKFQGQCYKYFAHRRTWDAAERECRLQGAHLTSILSHEEQMFVNRVGHDYQWIGLNDKMFEHDFRWTDGSTLQYENWRPNQPDSFFSAGEDCVVIIWHENGQWNDVPCNYHLTYTCKKGTVACGQPPVVENAKTFGKMKPRYEINSLIRYHCKDGFIQRHLPTIRCLGNGRWAIPKITCMNPSAYQRTYSMKYFKNSSSAKDNSINTSKHDHRWSRRWQESRR

SEQ ID NO: 38070 - protein, 1594 aa, Homo sapiens
  REGION 1..1594: note = ENSP00000425959
MPTLPPSYNTSEFLRIKWSKIEVDKNGKDLKETTVLVAQNGNIKIGQDYKGRVSVPTHPEAVGDASLTVVKLLASDAGLYRCDVMYGIEDTQDTVSLTVDGVVFHYRAATSRYTLNFEAAQKACLDVGAVIATPEQLFAAYEDGFEQCDAGWLADQTVRYPIRAPRVGCYGDKMGKAGVRTYGFRSPQETYDVYCYVDHLDGDVFHLTVPSKFTFEEAAKECENQDARLATVGELQAAWRNGFDQCDYGWLSDASVRHPVTVARAQCGGGLLGVRTLYRFENQTGFPPPDSRFDAYCFKPKEATTIDLSILAETASPSLSKEPQMVSDRTTPIIPLVDELPVIPTEFPPVGNIVSFEQKATVQPQAITDSLATKLPTPTGSTKKPWDMDDYSPSASGPLGKLDISEIKEEVLQSTTGVSHYATDSWDGVVEDKQTQESVTQIEQIEVGPLVTSMEILKHIPSKEFPVTETPLVTARMILESKTEKKMVSTVSELVTTGHYGFTLGEEDDEDRTLTVGSDESTLIFDQIPEVITVSKTSEDTIHTHLEDLESVSASTTVSPLIMPDNNGSSMDDWEERQTSGRITEEFLGKYLSTTPFPSQHRTEIELFPYSGDKILVEGISTVIYPSLQTEMTHRRERTETLIPEMRTDTYTDEIQEEITKSPFMGKTEEEVFSGMKLSTSLSEPIHVTESSVEMTKSFDFPTLITKLSAEPTEVRDMEEDFTATPGTTKYDENITTVLLAHGTLSVEAATVSKWSWDEDNTTSKPLESTEPSASSKLPPALLTTVGMNGKDKDIPSFTEDGADEFTLIPDSTQKQLEEVTDEDIAAHGKFTIRFQPTTSTGIAEKSTLRDSTTEEKVPPITSTEGQVYATMEGSALGEVEDVDLSKPVSTVPQFAHTSEVEGLAFVSYSSTQEPTTYVDSSHTIPLSVIPKTDWGVLVPSVPSEDEVLGEPSQDILVIDQTRLEATISPETMRTTKITEGTTQEEFPWKEQTAEKPVPALSSTAWTPKEAVTPLDEQEGDGSAYTVSEDELLTGSERVPVLETTPVGKIDHSVSYPPGAVTEHKVKTDEVVTLTPRIGPKVSLSPGPEQKYETEGSSTTGFTSSLSPFSTHITQLMEETTTEKTSLEDIDLGSGLFEKPKATELIEFSTIKVTVPSDITTAFSSVDRLHTTSAFKPSSAITKKPPLIDREPGEETTSDMVIIGESTSHVPPTTLEDIVAKETETDIDREYFTTSSPPATQPTRPPTVEDKEAFGPQALSTPQPPASTKFHPDINVYIIEVRENKTGPDRCKMNPCLNGGTCYPTETSYVCTCVPGYSGDQCELDFDECHSNPCRNGATCVDGFNTFRCLCLPSYVGALCEQDTETCDYGWHKFQGQCYKYFAHRRTWDAAERECRLQGAHLTSILSHEEQMFVNRVGHDYQWIGLNDKMFEHDFRWTDGSTLQYENWRPNQPDSFFSAGEDCVVIIWHENGQWNDVPCNYHLTYTCKKGTVACGQPPVVENAKTFGKMKPRYEINSLIRYHCKDGFIQRHLPTIRCLGNGRWAIPKITCMNPSAYQRTYSMKYFKNSSSAKDNSINTSKHDHRWSRRWQESRR

SEQ ID NO: 38071 - protein, 1240 aa, Homo sapiens
  REGION 1..1240: note = ENSP00000426251
MFINIKSILWMCSTLIVTHALHKVKVGKSPPVRGSLSGKVSLPCHFSTMPTLPPSYNTSEFLRIKWSKIEVDKNGKDLKETTVLVAQNGNIKIGQDYKGRVSVPTHPEAVGDASLTVVKLLASDAGLYRCDVMYGIEDTQDTVSLTVDGVVFHYRAATSRYTLNFEAAQKACLDVGAVIATPEQLFAAYEDGFEQCDAGWLADQTVRYPIRAPRVGCYGDKMGKAGVRTYGFRSPQETYDVYCYVDHLDGDVFHLTVPSKFTFEEAAKECENQDARLATVGELQAAWRNGFDQCDYGWLSDASVRHPVTVARAQCGGGLLGVRTLYRFENQTGFPPPDSRFDAYCFKRRMSDLSVIGHPIDSESKEDEPCSEETDPVHDLMAEILPEFPDIIEIDLYHSEENEEEEEECANATDVTTTPSVQYINGKHLVTTVPKDPEAAEARRGQFESVAPSQNFSDSSESDTHPFVIAKTELSTAVQPNESTETTESLEVTWKPETYPETSEHFSGGEPDVFPTVPFHEEFESGTAKKGAESVTERDTEVGHQAHEHTEPVSLFPEESSGEIAIDQESQKIAFARATEVTFGEEVEKSTSVTYTPTIVPSSASAYVSEEEAVTLIGNPWPDDLLSTKESWVEATPRQVVELSGSSSIPITEGSGEAEEDEDTMFTMVTDLSQRNTTDTLITLDTSRIITESFFEVPATTIYPVSEQPSAKVVPTKFVSETDTSEWISSTTVEEKKRKEEEGTTGTASTFEVYSSTQRSDQLILPFELESPNVATSSDSGTRKSFMSLTTPTQSEREMTDSTPVFTETNTLENLGAQTTEHSSIHQPGVQEGLTTLPRSPASVFMEQGSGEAAADPETTTVSSFSLNVEYAIQAEKEVAGTLSPHVETTFSTEPTGLVLSTVMDRVVAENITQTSREIVISERLGEPNYGAEIRGFSTGFPLEEDFSGDFREYSTVSHPIAKEETVMMEGSGDAAFRDTQTSPSTVPTSVHISHISDSEGPSSTMVSTSAFPWEEFTSSAEGSGEQLVTVSSSVVPVLPSAVQKFSGTASSIIDEGLGEVGTVNEIDRRSTILPTAEVEGTKAPVEKEEVKVSGTVSTNFPQTIEPAKLWSRQEVNPVRQEIESETTSEEQIQEEKSFESPQNSPATEQTIFDSQTFTETELKTTDYSVLTTKKTYSDDKEMKEEDTSLVNMSTPDPDANGLESYTTLPEATEKSHFFLATALVTESIPAEHVVTDSPI

SEQ ID NO: 38072 - protein, 354 aa, Homo sapiens
  REGION 1..354: note = ENSP00000426715
MFINIKSILWMCSTLIVTHALHKVKVGKSPPVRGSLSGKVSLPCHFSTMPTLPPSYNTSEFLRIKWSKIEVDKNGKDLKETTVLVAQNGNIKIGQDYKGRVSVPTHPEAVGDASLTVVKLLASDAGLYRCDVMYGIEDTQDTVSLTVDGVVFHYRAATSRYTLNFEAAQKACLDVGAVIATPEQLFAAYEDGFEQCDAGWLADQTVRYPIRAPRVGCYGDKMGKAGVRTYGFRSPQETYDVYCYVDHLDGDVFHLTVPSKFTFEEAAKECENQDARLATVGELQAAWRNGFDQCDYGWLSDASVRHPVTVARAQCGGGLLGVRTLYRFENQTGFPPPDSRFDAYCFKRKCLIPF

SEQ ID NO: 38073 - protein, 655 aa, Homo sapiens
  REGION 1..655: note = ENSP00000421362
MFINIKSILWMCSTLIVTHALHKVKVGKSPPVRGSLSGKVSLPCHFSTMPTLPPSYNTSEFLRIKWSKIEVDKNGKDLKETTVLVAQNGNIKIGQDYKGRVSVPTHPEAVGDASLTVVKLLASDAGLYRCDVMYGIEDTQDTVSLTVDGVVFHYRAATSRYTLNFEAAQKACLDVGAVIATPEQLFAAYEDGFEQCDAGWLADQTVRYPIRAPRVGCYGDKMGKAGVRTYGFRSPQETYDVYCYVDHLDGDVFHLTVPSKFTFEEAAKECENQDARLATVGELQAAWRNGFDQCDYGWLSDASVRHPVTVARAQCGGGLLGVRTLYRFENQTGFPPPDSRFDAYCFKRPDRCKMNPCLNGGTCYPTETSYVCTCVPGYSGDQCELDFDECHSNPCRNGATCVDGFNTFRCLCLPSYVGALCEQDTETCDYGWHKFQGQCYKYFAHRRTWDAAERECRLQGAHLTSILSHEEQMFVNRVGHDYQWIGLNDKMFEHDFRWTDGSTLQYENWRPNQPDSFFSAGEDCVVIIWHENGQWNDVPCNYHLTYTCKKGTVACGQPPVVENAKTFGKMKPRYEINSLIRYHCKDGFIQRHLPTIRCLGNGRWAIPKITCMNPSAYQRTYSMKYFKNSSSAKDNSINTSKHDHRWSRRWQESRR

SEQ ID NO: 38074 - protein, 1642 aa, Homo sapiens
  REGION 1..1642: note = ENSP00000342768
MFINIKSILWMCSTLIVTHALHKVKVGKSPPVRGSLSGKVSLPCHFSTMPTLPPSYNTSEFLRIKWSKIEVDKNGKDLKETTVLVAQNGNIKIGQDYKGRVSVPTHPEAVGDASLTVVKLLASDAGLYRCDVMYGIEDTQDTVSLTVDGVVFHYRAATSRYTLNFEAAQKACLDVGAVIATPEQLFAAYEDGFEQCDAGWLADQTVRYPIRAPRVGCYGDKMGKAGVRTYGFRSPQETYDVYCYVDHLDGDVFHLTVPSKFTFEEAAKECENQDARLATVGELQAAWRNGFDQCDYGWLSDASVRHPVTVARAQCGGGLLGVRTLYRFENQTGFPPPDSRFDAYCFKPKEATTIDLSILAETASPSLSKEPQMVSDRTTPIIPLVDELPVIPTEFPPVGNIVSFEQKATVQPQAITDSLATKLPTPTGSTKKPWDMDDYSPSASGPLGKLDISEIKEEVLQSTTGVSHYATDSWDGVVEDKQTQESVTQIEQIEVGPLVTSMEILKHIPSKEFPVTETPLVTARMILESKTEKKMVSTVSELVTTGHYGFTLGEEDDEDRTLTVGSDESTLIFDQIPEVITVSKTSEDTIHTHLEDLESVSASTTVSPLIMPDNNGSSMDDWEERQTSGRITEEFLGKYLSTTPFPSQHRTEIELFPYSGDKILVEGISTVIYPSLQTEMTHRRERTETLIPEMRTDTYTDEIQEEITKSPFMGKTEEEVFSGMKLSTSLSEPIHVTESSVEMTKSFDFPTLITKLSAEPTEVRDMEEDFTATPGTTKYDENITTVLLAHGTLSVEAATVSKWSWDEDNTTSKPLESTEPSASSKLPPALLTTVGMNGKDKDIPSFTEDGADEFTLIPDSTQKQLEEVTDEDIAAHGKFTIRFQPTTSTGIAEKSTLRDSTTEEKVPPITSTEGQVYATMEGSALGEVEDVDLSKPVSTVPQFAHTSEVEGLAFVSYSSTQEPTTYVDSSHTIPLSVIPKTDWGVLVPSVPSEDEVLGEPSQDILVIDQTRLEATISPETMRTTKITEGTTQEEFPWKEQTAEKPVPALSSTAWTPKEAVTPLDEQEGDGSAYTVSEDELLTGSERVPVLETTPVGKIDHSVSYPPGAVTEHKVKTDEVVTLTPRIGPKVSLSPGPEQKYETEGSSTTGFTSSLSPFSTHITQLMEETTTEKTSLEDIDLGSGLFEKPKATELIEFSTIKVTVPSDITTAFSSVDRLHTTSAFKPSSAITKKPPLIDREPGEETTSDMVIIGESTSHVPPTTLEDIVAKETETDIDREYFTTSSPPATQPTRPPTVEDKEAFGPQALSTPQPPASTKFHPDINVYIIEVRENKTGPDRCKMNPCLNGGTCYPTETSYVCTCVPGYSGDQCELDFDECHSNPCRNGATCVDGFNTFRCLCLPSYVGALCEQDTETCDYGWHKFQGQCYKYFAHRRTWDAAERECRLQGAHLTSILSHEEQMFVNRVGHDYQWIGLNDKMFEHDFRWTDGSTLQYENWRPNQPDSFFSAGEDCVVIIWHENGQWNDVPCNYHLTYTCKKGTVACGQPPVVENAKTFGKMKPRYEINSLIRYHCKDGFIQRHLPTIRCLGNGRWAIPKITCMNPSAYQRTYSMKYFKNSSSAKDNSINTSKHDHRWSRRWQESRR

SEQ ID NO: 38075 - protein, 2409 aa, Homo sapiens
  REGION 1..2409: note = ENSP00000340062
MFINIKSILWMCSTLIVTHALHKVKVGKSPPVRGSLSGKVSLPCHFSTMPTLPPSYNTSEFLRIKWSKIEVDKNGKDLKETTVLVAQNGNIKIGQDYKGRVSVPTHPEAVGDASLTVVKLLASDAGLYRCDVMYGIEDTQDTVSLTVDGVVFHYRAATSRYTLNFEAAQKACLDVGAVIATPEQLFAAYEDGFEQCDAGWLADQTVRYPIRAPRVGCYGDKMGKAGVRTYGFRSPQETYDVYCYVDHLDGDVFHLTVPSKFTFEEAAKECENQDARLATVGELQAAWRNGFDQCDYGWLSDASVRHPVTVARAQCGGGLLGVRTLYRFENQTGFPPPDSRFDAYCFKRRMSDLSVIGHPIDSESKEDEPCSEETDPVHDLMAEILPEFPDIIEIDLYHSEENEEEEEECANATDVTTTPSVQYINGKHLVTTVPKDPEAAEARRGQFESVAPSQNFSDSSESDTHPFVIAKTELSTAVQPNESTETTESLEVTWKPETYPETSEHFSGGEPDVFPTVPFHEEFESGTAKKGAESVTERDTEVGHQAHEHTEPVSLFPEESSGEIAIDQESQKIAFARATEVTFGEEVEKSTSVTYTPTIVPSSASAYVSEEEAVTLIGNPWPDDLLSTKESWVEATPRQVVELSGSSSIPITEGSGEAEEDEDTMFTMVTDLSQRNTTDTLITLDTSRIITESFFEVPATTIYPVSEQPSAKVVPTKFVSETDTSEWISSTTVEEKKRKEEEGTTGTASTFEVYSSTQRSDQLILPFELESPNVATSSDSGTRKSFMSLTTPTQSEREMTDSTPVFTETNTLENLGAQTTEHSSIHQPGVQEGLTTLPRSPASVFMEQGSGEAAADPETTTVSSFSLNVEYAIQAEKEVAGTLSPHVETTFSTEPTGLVLSTVMDRVVAENITQTSREIVISERLGEPNYGAEIRGFSTGFPLEEDFSGDFREYSTVSHPIAKEETVMMEGSGDAAFRDTQTSPSTVPTSVHISHISDSEGPSSTMVSTSAFPWEEFTSSAEGSGEQLVTVSSSVVPVLPSAVQKFSGTASSIIDEGLGEVGTVNEIDRRSTILPTAEVEGTKAPVEKEEVKVSGTVSTNFPQTIEPAKLWSRQEVNPVRQEIESETTSEEQIQEEKSFESPQNSPATEQTIFDSQTFTETELKTTDYSVLTTKKTYSDDKEMKEEDTSLVNMSTPDPDANGLESYTTLPEATEKSHFFLATALVTESIPAEHVVTDSPIKKEESTKHFPKGMRPTIQESDTELLFSGLGSGEEVLPTLPTESVNFTEVEQINNTLYPHTSQVESTSSDKIEDFNRMENVAKEVGPLVSQTDIFEGSGSVTSTTLIEILSDTGAEGPTVAPLPFSTDIGHPQNQTVRWAEEIQTSRPQTITEQDSNKNSSTAEINETTTSSTDFLARAYGFEMAKEFVTSAPKPSDLYYEPSGEGSGEVDIVDSFHTSATTQATRQESSTTFVSDGSLEKHPEVPSAKAVTADGFPTVSVMLPLHSEQNKSSPDPTSTLSNTVSYERSTDGSFQDRFREFEDSTLKPNRKKPTENIIIDLDKEDKDLILTITESTILEILPELTSDKNTIIDIDHTKPVYEDILGMQTDIDTEVPSEPHDSNDESNDDSTQVQEIYEAAVNLSLTEETFEGSADVLASYTQATHDESMTYEDRSQLDHMGFHFTTGIPAPSTETELDVLLPTATSLPIPRKSATVIPEIEGIKAEAKALDDMFESSTLSDGQAIADQSEIIPTLGQFERTQEEYEDKKHAGPSFQPEFSSGAEEALVDHTPYLSIATTHLMDQSVTEVPDVMEGSNPPYYTDTTLAVSTFAKLSSQTPSSPLTIYSGSEASGHTEIPQPSALPGIDVGSSVMSPQDSFKEIHVNIEATFKPSSEEYLHITEPPSLSPDTKLEPSEDDGKPELLEEMEASPTELIAVEGTEILQDFQNKTDGQVSGEAIKMFPTIKTPEAGTVITTADEIELEGATQWPHSTSASATYGVEAGVVPWLSPQTSERPTLSSSPEINPETQAALIRGQDSTIAASEQQVAARILDSNDQATVNPVEFNTEVATPPFSLLETSNETDFLIGINEESVEGTAIYLPGPDRCKMNPCLNGGTCYPTETSYVCTCVPGYSGDQCELDFDECHSNPCRNGATCVDGFNTFRCLCLPSYVGALCEQDTETCDYGWHKFQGQCYKYFAHRRTWDAAERECRLQGAHLTSILSHEEQMFVNRVGHDYQWIGLNDKMFEHDFRWTDGSTLQYENWRPNQPDSFFSAGEDCVVIIWHENGQWNDVPCNYHLTYTCKKGTVACGQPPVVENAKTFGKMKPRYEINSLIRYHCKDGFIQRHLPTIRCLGNGRWAIPKITCMNPSAYQRTYSMKYFKNSSSAKDNSINTSKHDHRWSRRWQESRR

SEQ ID NO: 38076 - protein, 290 aa, Homo sapiens
  REGION 1..290: note = ENSP00000273038
METPLDVLSRAASLVHADDEKREAALRGEPRIQTLPVASALSSHRTGPPPISPSKRKFSMEPGDEDLDCDNDHVSKMSRIFNPHLNKTANGDCRRDPRERSRSPIERAVAPTMSLHGSHLYTSLPSLGLEQPLALTKNSLDASRPAGLSPTLTPGERQQNRPSVITCASAGARNCNLSHCPIAHSGCAAPGPASYRRPPSAATTCDPVVEEHFRRSLGKNYKEPEPAPNSVSITGSVDDHFAKALGDTWLQIKAAKDGASSSPESASRRGQPASPSAHMVSHSHSPSVVS

SEQ ID NO: 38077 - protein, 231 aa, Homo sapiens
  REGION 1..231: note = ENSP00000404624
MEPGDEDLDCDNDHVSKMSRIFNPHLNKTANGDCRRDPRERSRSPIERAVAPTMSLHGSHLYTSLPSLGLEQPLALTKNSLDASRPAGLSPTLTPGERQQNRPSVITCASAGARNCNLSHCPIAHSGCAAPGPASYRRPPSAATTCDPVVEEHFRRSLGKNYKEPEPAPNSVSITGSVDDHFAKALGDTWLQIKAAKDGASSSPESASRRGQPASPSAHMVSHSHSPSVVS

SEQ ID NO: 38078 - protein, 210 aa, Homo sapiens
  REGION 1..210: note = ENSP00000416615
MIKVRNKTANGDCRRDPRERSRSPIERAVAPTMSLHGSHLYTSLPSLGLEQPLALTKNSLDASRPAGLSPTLTPGERQQNRPSVITCASAGARNCNLSHCPIAHSGCAAPGPASYRRPPSAATTCDPVVEEHFRRSLGKNYKEPEPAPNSVSITGSVDDHFAKALGDTWLQIKAAKDGASSSPESASRRGQPASPSAHMVSHSHSPSVVS

SEQ ID NO: 38079 - protein, 206 aa, Homo sapiens
  REGION 1..206: note = ENSP00000402878
MNKTANGDCRRDPRERSRSPIERAVAPTMSLHGSHLYTSLPSLGLEQPLALTKNSLDASRPAGLSPTLTPGERQQNRPSVITCASAGARNCNLSHCPIAHSGCAAPGPASYRRPPSAATTCDPVVEEHFRRSLGKNYKEPEPAPNSVSITGSVDDHFAKALGDTWLQIKAAKDGASSSPESASRRGQPASPSAHMVSHSHSPSVVS

SEQ ID NO: 38080 - protein, 296 aa, Homo sapiens
  REGION 1..296: note = ENSP00000404251
MLFMKMDLLNYQYLDKMNNNIGILCYEGEAALRGEPRIQTLPVASALSSHRTGPPPISPSKRKFSMEPGDEDLDCDNDHVSKMSRIFNPHLNKTANGDCRRDPRERSRSPIERAVAPTMSLHGSHLYTSLPSLGLEQPLALTKNSLDASRPAGLSPTLTPGERQQNRPSVITCASAGARNCNLSHCPIAHSGCAAPGPASYRRPPSAATTCDPVVEEHFRRSLGKNYKEPEPAPNSVSITGSVDDHFAKALGDTWLQIKAAKDGASSSPESASRRGQPASPSAHMVSHSHSPSVVS

SEQ ID NO: 38081 - protein, 295 aa, Homo sapiens
  REGION 1..295: note = ENSP00000413030
MTENTHFDKIPESCALKSWRHPGLHHGEAALRGEPRIQTLPVASALSSHRTGPPPISPSKRKFSMEPGDEDLDCDNDHVSKMSRIFNPHLNKTANGDCRRDPRERSRSPIERAVAPTMSLHGSHLYTSLPSLGLEQPLALTKNSLDASRPAGLSPTLTPGERQQNRPSVITCASAGARNCNLSHCPIAHSGCAAPGPASYRRPPSAATTCDPVVEEHFRRSLGKNYKEPEPAPNSVSITGSVDDHFAKALGDTWLQIKAAKDGASSSPESASRRGQPASPSAHMVSHSHSPSVVS

SEQ ID NO: 38082 - protein, 223 aa, Homo sapiens
  REGION 1..223: note = ENSP00000412923
METPLDVLSRAASLVHADDEKREAALRGEPRIQTLPVASALSSHRTGPPPISPSKRKFSMEPGDEDLDCDNDHVSKMSRIFNPHLNKTANGDCRRDPRERSRSPIERAVAPTMSLHGSHLYTSLPSLGLEQPLALTKNSLDASRPAGLSPTLTPGERQQNRPSVITCASAGARNCNLSHCPIAHSGCAAPGPASYRRPPSAATTCDPVVEEHFRRSLGKNYKE

SEQ ID NO: 38083 - protein, 200 aa, Homo sapiens
  REGION 1..200: note = ENSP00000394439
METPLDVLSRAASLVHADDEKREAALRGEPRIQTLPVASALSSHRTGPPPISPSKRKFSMEPGDEDLDCDNDHVSKMSRIFNPHLNKTANGDCRRDPRERSRSPIERAVAPTMSLHGSHLYTSLPSLGLEQPLALTKNSLDASRPAGLSPTLTPGERQQNRPSVITCASAGARNCNLSHCPIAHSGCAAPGPASYRRPPS

SEQ ID NO: 38084 - protein, 190 aa, Homo sapiens
  REGION 1..190: note = ENSP00000394123
MKDLKKRVALGYISTHTGEAALRGEPRIQTLPVASALSSHRTGPPPISPSKRKFSMEPGDEDLDCDNDHVSKMSRIFNPHLNKTANGDCRRDPRERSRSPIERAVAPTMSLHGSHLYTSLPSLGLEQPLALTKNSLDASRPAGLSPTLTPGERQQNRPSVITCASAGARNCNLSHCPIAHSGCAAPGPAS

SEQ ID NO: 38085 - protein, 169 aa, Homo sapiens
  REGION 1..169: note = ENSP00000391932
METPLDVLSRAASLVHADDEKREAALRGEPRIQTLPVASALSSHRTGPPPISPSKRKFSMEPGDEDLDCDNDHVSKMSRIFNPHLNKTANGDCRRDPRERSRSPIERAVAPTMSLHGSHLYTSLPSLGLEQPLALTKNSLDASRPAGLSPTLTPGERQQVGLCLGGWRG

SEQ ID NO: 38086 - protein, 147 aa, Homo sapiens
  REGION 1..147: note = ENSP00000411670
MTENTHFDKIPESCALKSWRHPGLHHGEAALRGEPRIQTLPVASALSSHRTGPPPISPSKRKFSMEPGDEDLDCDNDHVSKMSRIFNPHLNKTANGDCRRDPRERSRSPIERAVAPTMSLHGSHLYTSLPSLGLEQPLALTKNSLDA

SEQ ID NO: 38087 - protein, 81 aa, Homo sapiens
  REGION 1..81: note = ENSP00000391554
MEPGDEDLDCDNDHVSKMSRIFNPHLNKTANGDCRRDPRERSRSPIERAVAPTMSLHGSHLYTSLPSLGLEQPLALTKNSL

SEQ ID NO: 38088 - protein, 127 aa, Homo sapiens
  REGION 1..127: note = ENSP00000395557
METPLDVLSRAASLVHADDEKREAALRGEPRIQTLPVASALSSHRTGPPPISPSKRKFSMEPGDEDLDCDNDHVSKMSRIFNPHLNKTANGDCRRDPRERSRSPIERAVAPTMSLHGSHLYTSLPSL

SEQ ID NO: 38089 - protein, 60 aa, Homo sapiens
  REGION 1..60: note = ENSP00000393100
MEPGDEDLDCDNDHVSKMSRIFNPHLNKTANGDCRRDPRERSRSPIERAVAPTMSLHGSH

SEQ ID NO: 38090 - protein, 59 aa, Homo sapiens
  REGION 1..59: note = ENSP00000485472
METPLDVLSRAASLVHADDEKREAALRGEPRIQTLPVASALSSHRTGPPPISPSKRKFS

SEQ ID NO: 38091 - protein, 31 aa, Homo sapiens
  REGION 1..31: note = ENSP00000492281
METPLDVLSRAASLVHADDEKRSCCVAQAGF

SEQ ID NO: 38092 - protein, 466 aa, Homo sapiens
  REGION 1..466: note = ENSP00000446007
MSTRSVSSSSYRRMFGGPGTASRPSSSRSYVTTSTRTYSLGSALRPSTSRSLYASSPGGVYATRSSAVRLRSSVPGVRLLQDSVDFSLADAINTEFKNTRTNEKVELQELNDRFANYIDKVRFLEQQNKILLAELEQLKGQGKSRLGDLYEEEMRELRRQVDQLTNDKARVEVERDNLAEDIMRLREKLQEEMLQREEAENTLQSFRQDVDNASLARLDLERKVESLQEEIAFLKKLHEEEIQELQAQIQEQHVQIDVDVSKPDLTAALRDVRQQYESVAAKNLQEAEEWYKSKFADLSEAANRNNDALRQAKQESTEYRRQVQSLTCEVDALKGTNESLERQMREMEENFAVEAANYQDTIGRLQDEIQNMKEEMARHLREYQDLLNVKMALDIEIATYRKLLEGEESRISLPLPNFSSLNLRETNLDSLPLVDTHSKRTLLIKTVETRDGQVINETSQHHDDLE

SEQ ID NO: 38093 - protein, 149 aa, Homo sapiens
  REGION 1..149: note = ENSP00000489830
MSTRSVSSSSYRRMFGGPGTASRPSSSRSYVTTSTRTYSLGSALRPSTSRSLYASSPGGVYATRSSAVRLRSSVPGVRLLQDSVDFSLADAINTEFKNTRTNEKVELQELNDRFANYIDKVRFLEQQNKILLAELEQLKGQGKSRLGDL

SEQ ID NO: 38094 - protein, 109 aa, Homo sapiens
  REGION 1..109: note = ENSP00000490509
MSTRSVSSSSYRRMFGGPGTASRPSSSRSYVTTSTRTYSLGSALRPSTSRSLYASSPGGVYATRSSAVRLRSSVPGVRLLQDSVDFSLADAINTEFKNTRTNEKVELQE

SEQ ID NO: 38095 - protein, 466 aa, Homo sapiens; identical to SEQ ID NO: 38092
  REGION 1..466: note = ENSP00000224237

SEQ ID NO: 38096 - protein, 431 aa, Homo sapiens
  REGION 1..431: note = ENSP00000435613
MSTRSVSSSSYRRMFGGPGTASRPSSSRSYVTTSTRTYSLGSALRPSTSRSLYASSPGGVYATRSSAVRLRSSVPGVRLLQDSVDFSLADAINTEFKNTRTNEKVELQELNDRFANYIDKVRFLEQQNKILLAELEQLKGQGKSRLGDLYEEEMRELRRQVDQLTNDKARVEVERDNLAEDIMRLREKLQEEMLQREEAENTLQSFRQDVDNASLARLDLERKVESLQEEIAFLKKLHEEEIQELQAQIQEQHVQIDVDVSKPDLTAALRDVRQQYESVAAKNLQEAEEWYKSKFADLSEAANRNNDALRQAKQESTEYRRQVQSLTCEVDALKGTNESLERQMREMEENFAVEAANYQDTIGRLQDEIQNMKEEMARHLREYQDLLNVKMALDIEIATYRKLLEGEESRISLPLPNFSSLNLRGKHFISL

SEQ ID NO: 38097 - protein, 228 aa, Homo sapiens
  REGION 1..228: note = ENSP00000431702
MRNCFRLQEEMLQREEAENTLQSFRQDVDNASLARLDLERKVESLQEEIAFLKKLHEEEIQELQAQIQEQHVQIDVDVSKPDLTAALRDVRQQYESVAAKNLQEAEEWYKSKFADLSEAANRNNDALRQAKQESTEYRRQVQSLTCEVDALKGTNESLERQMREMEENFAVEAANYQDTIGRLQDEIQNMKEEMARHLREYQDLLNVKMALDIEIATYRKLLEGEESR

SEQ ID NO: 38098 - protein, 170 aa, Homo sapiens
  REGION 1..170: note = ENSP00000356213
MDTRNKAQLLVLLTLLSVLFSQTSAWPLYRAPSALRLGDRIPFEGANEPDQVSLKEDIDMLQNALAENDTPYYDVSRNARHADGVFTSDFSKLLGQLSAKKYLESLMGKRVSSNISEDPVPVKRHSDAVFTDNYTRLRKQMAVKKYLNSILNGKRSSEGESPDFPEELEK

SEQ ID NO: 38099 - protein, 169 aa, Homo sapiens
  REGION 1..169: note = ENSP00000356212
MDTRNKAQLLVLLTLLSVLFSQTSAWPLYRAPSALRLGDRIPFEGANEPDQVSLKEDIDMLQNALAENDTPYYDVSRNARHADGVFTSDFSKLLGQLSAKKYLESLMGKRVSNISEDPVPVKRHSDAVFTDNYTRLRKQMAVKKYLNSILNGKRSSEGESPDFPEELEK

SEQ ID NO: 38100 - protein, 119 aa, Homo sapiens
  REGION 1..119: note = ENSP00000410356
  VARIANT 1: note = Any amino acid
XVSLKEDIDMLQNALAENDTPYYDVSRNARHADGVFTSDFSKLLGQLSAKKYLESLMGKRVSSNISEDPVPVKRHSDAVFTDNYTRLRKQMAVKKYLNSILNGKRSEGESPDFPEELEK

SEQ ID NO: 38101 - protein, 438 aa, Homo sapiens
  REGION 1..438: note = ENSP00000262178
MRTLLPPALLTCWLLAPVNSIHPECRFHLEIQEEETKCAELLRSQTEKHKACSGVWDNITCWRPANVGETVTVPCPKVFSNFYSKAGNISKNCTSDGWSETFPDFVDACGYSDPEDESKITFYILVKAIYTLGYSVSLMSLATGSIILCLFRKLHCTRNYIHLNLFLSFILRAISVLVKDDVLYSSSGTLHCPDQPSSWVGCKLSLVFLQYCIMANFFWLLVEGLYLHTLLVAMLPPRRCFLAYLLIGWGLPTVCIGAWTAARLYLEDTGCWDTNDHSVPWWVIRIPILISIIVNFVLFISIIRILLQKLTSPDVGGNDQSQYKRLAKSTLLLIPLFGVHYMVFAVFPISISSKYQILFELCLGSFQGLVVAVLYCFLNSEVQCELKRKWRSRCPTPSASRDYRVCGSSFSRNGSEGALQFHRGSRAQSFLQTETSVI

SEQ ID NO: 38102 - protein, 422 aa, Homo sapiens
  REGION 1..422: note = ENSP00000366860
MPLWEAPSDHPANPPATLQGHTSLPGCQEEPARDPQSGLPQITSESSSFSEGSLPSWSSGPAGAKLNASHEGIGSSSDGNGDSKAATERVVSAMDTVRRKHPEITFYILVKAIYTLGYSVSLMSLATGSIILCLFRKLHCTRNYIHLNLFLSFILRAISVLVKDDVLYSSSGTLHCPDQPSSWVGCKLSLVFLQYCIMANFFWLLVEGLYLHTLLVAMLPPRRCFLAYLLIGWGLPTVCIGAWTAARLYLEDTGCWDTNDHSVPWWVIRIPILISIIVNFVLFISIIRILLQKLTSPDVGGNDQSQYKRLAKSTLLLIPLFGVHYMVFAVFPISISSKYQILFELCLGSFQGLVVAVLYCFLNSEVQCELKRKWRSRCPTPSASRDYRVCGSSFSRNGSEGALQFHRGSRAQSFLQTETSVI

SEQ ID NO: 38103 - protein, 579 aa, Homo sapiens
  REGION 1..579: note = ENSP00000384497
MRTLLPPALLTCWLLAPVSAPATPAPRRLGPGSPLPRRALLPPVFAFLPGAGARAGSGRGSGVARGPELPPGEREALSSGPAGLRDSGWEAACALPRAPPSGVCWKRDRFFLDASTMSSFGAVPGAGSCGRLRGLRVSRGDRGWRWPQMPLGPSLYLLVNSIHPECRFHLEIQEEETKCAELLRSQTEKHKACSGVWDNITCWRPANVGETVTVPCPKVFSNFYSKAGNISKNCTSDGWSETFPDFVDACGYSDPEDESKITFYILVKAIYTLGYSVSLMSLATGSIILCLFRKLHCTRNYIHLNLFLSFILRAISVLVKDDVLYSSSGTLHCPDQPSSWVGCKLSLVFLQYCIMANFFWLLVEGLYLHTLLVAMLPPRRCFLAYLLIGWGLPTVCIGAWTAARLYLEDTGCWDTNDHSVPWWVIRIPILISIIVNFVLFISIIRILLQKLTSPDVGGNDQSQYKRLAKSTLLLIPLFGVHYMVFAVFPISISSKYQILFELCLGSFQGLVVAVLYCFLNSEVQCELKRKWRSRCPTPSASRDYRVCGSSFSRNGSEGALQFHRGSRAQSFLQTETSVI

SEQ ID NO: 38104 - protein, 77 aa, Homo sapiens
  REGION 1..77: note = ENSP00000402690
MRTLLPPALLTCWLLAPVNSIHPECRFHLEIQEEETKCAELLRSQTEKHKGHTKGFILIHAGGLKRILDPHTYPLAP

SEQ ID NO: 38105 - protein, 693 aa, Homo sapiens
  REGION 1..693: note = ENSP00000368544
MRTVVLTMKASVIEMFLVLLVTGVHSNKETAKKIKRPKFTVPQINCDVKAGKIIDPEFIVKCPAGCQDPKYHVYGTDVYASYSSVCGAAVHSGVLDNSGGKILVRKVAGQSGYKGSYSNGVQSLSLPRWRESFIVLESKPKKGVTYPSALTYSSSKSPAAQAGETTKAYQRPPIPGTTAQPVTLMQLLAVTVAVATPTTLPRPSPSAASTTSIPRPQSVGHRSQEMDLWSTATYTSSQNRPRADPGIQRQDPSGAAFQKPVGADVSLGEMDSWKPGSVLLDEGLVPKEELSTQSLEPVSLGDPNCKIDLSFLIDGSTSIGKRRFRIQKQLLADVAQALDIGPAGPLMGVVQYGDNPATHFNLKTHTNSRDLKTAIEKITQRGGLSNVGRAISFVTKNFFSKANGNRSGAPNVVVVMVDGWPTDKVEEASRLARESGINIFFITIEGAAENEKQYVVEPNFANKAVCRTNGFYSLHVQSWFGLHKTLQPLVKRVCDTDRLACSKTCLNSADIGFVIDGSSSVGTGNFRTVLQFVTNLTKEFEISDTDTRIGAVQYTYEQRLEFGFDKYSSKPDILNAIKRVGYWSGGTSTGAAINFALEQLFKKSKPNKRKLMILITDGRSYDDVRIPAMAAHLKGVITYAIGVAWAAQEELEVIATHPARDHSFFVDEFDNLHQYVPRIIQNICTEFNSQPRN

SEQ ID NO: 38106 - protein, 203 aa, Homo sapiens
  REGION 1..203: note = ENSP00000393561
MRTVVLTMKASVIEMFLVLLVTGVHSNKETAKKIKRPKFTVPQINCDVKAGKIIDPEFIVKCPAGCQDPKYHVYGTDVYASYSSVCGAAVHSGVLDNSGGKILVRKVAGQSGYKGSYSNGVQSLSLPRWRESFIVLESKPKKGVTYPSALTYSSSKSPAAQAGKCSRVIESKPSESMNTRRVLGDSGEINILTGQAPLALAIF

SEQ ID NO: 38107 - protein, 347 aa, Homo sapiens
  REGION 1..347: note = ENSP00000417874
MGVVQYGDNPATHFNLKTHTNSRDLKTAIEKITQRGGLSNVGRAISFVTKNFFSKANGNRSGAPNVVVVMVDGWPTDKVEEASRLARESGINIFFITIEGAAENEKQYVVEPNFANKAVCRTNGFYSLHVQSWFGLHKTLQPLVKRVCDTDRLACSKTCLNSADIGFVIDGSSSVGTGNFRTVLQFVTNLTKEFEISDTDTRIGAVQYTYEQRLEFGFDKYSSKPDILNAIKRVGYWSGGTSTGAAINFALEQLFKKSKPNKRKLMILITDGRSYDDVRIPAMAAHLKGVITYAIGVAWAAQEELEVIATHPARDHSFFVDEFDNLHQYVPRIIQNICTEFNSQPRN

SEQ ID NO: 38108 - protein, 630 aa, Homo sapiens
  REGION 1..630: note = ENSP00000384154
MRTVVLTMKASVIEMFLAVPQINCDVKAGKIIDPEFIVKCPAGCQDPKYHVYGTDVYASYSSVCGAAVHSGVLDNSGGKILVRKVAGQSGYKGSYSNGVQSLSLPRWRESFIVLESKPKKGVTYPSALTYSSSKSPAAQAGETTKAYQRPPIPGTTAQPVTLMQLLAVTVAVATPTTLPRPSPSAASTTSIPRPQSVGHRSQEMGEMDSWKPGSVLLDEGLVPKEELSTQSLEPVSLGDPNCKIDLSFLIDGSTSIGKRRFRIQKQLLADVAQALDIGPAGPLMGVVQYGDNPATHFNLKTHTNSRDLKTAIEKITQRGGLSNVGRAISFVTKNFFSKANGNRSGAPNVVVVMVDGWPTDKVEEASRLARESGINIFFITIEGAAENEKQYVVEPNFANKAVCRTNGFYSLHVQSWFGLHKTLQPLVKRVCDTDRLACSKTCLNSADIGFVIDGSSSVGTGNFRTVLQFVTNLTKEFEISDTDTRIGAVQYTYEQRLEFGFDKYSSKPDILNAIKRVGYWSGGTSTGAAINFALEQLFKKSKPNKRKLMILITDGRSYDDVRIPAMAAHLKGVITYAIGVAWAAQEELEVIATHPARDHSFFVDEFDNLHQYVPRIIQNICTEFNSQPRN

SEQ ID NO: 38109 - protein, 656 aa, Homo sapiens
  REGION 1..656: note = ENSP00000368543
MRTVVLTMKASVIEMFLVLLVTGVHSNKETAKKIKRPKFTVPQINCDVKAGKIIDPEFIVKCPAGCQDPKYHVYGTDVYASYSSVCGAAVHSGVLDNSGGKILVRKVAGQSGYKGSYSNGVQSLSLPRWRESFIVLESKPKKGVTYPSALTYSSSKSPAAQAGETTKAYQRPPIPGTTAQPVTLMQLLAVTVAVATPTTLPRPSPSAASTTSIPRPQSVGHRSQEMDLWSTATYTSSQNRPRADPGLVPKEELSTQSLEPVSLGDPNCKIDLSFLIDGSTSIGKRRFRIQKQLLADVAQALDIGPAGPLMGVVQYGDNPATHFNLKTHTNSRDLKTAIEKITQRGGLSNVGRAISFVTKNFFSKANGNRSGAPNVVVVMVDGWPTDKVEEASRLARESGINIFFITIEGAAENEKQYVVEPNFANKAVCRTNGFYSLHVQSWFGLHKTLQPLVKRVCDTDRLACSKTCLNSADIGFVIDGSSSVGTGNFRTVLQFVTNLTKEFEISDTDTRIGAVQYTYEQRLEFGFDKYSSKPDILNAIKRVGYWSGGTSTGAAINFALEQLFKKSKPNKRKLMILITDGRSYDDVRIPAMAAHLKGVITYAIGVAWAAQEELEVIATHPARDHSFFVDEFDNLHQYVPRIIQNICTEFNSQPRN

SEQ ID NO: 38110 - protein, 657 aa, Homo sapiens
  REGION 1..657: note = ENSP00000385658
MRTVVLTMKASVIEMFLVLLVTGVHSNKETAKKIKRPKFTVPQINCDVKAGKIIDPEFIVKCPAGCQDPKYHVYGTDVYASYSSVCGAAVHSGVLDNSGGKILVRKVAGQSGYKGSYSNGVQSLSLPRWRESFIVLESKPKKGVTYPSALTYSSSKSPAAQAGETTKAYQRPPIPGTTAQPVTLMQLLAVTVAVATPTTLPRPSPSAASTTSIPRPQSVGHRSQEMDLWSTATYTSSQNRPRADPGIQRQDPSGAAFQKPVGADVSLDCKIDLSFLIDGSTSIGKRRFRIQKQLLADVAQALDIGPAGPLMGVVQYGDNPATHFNLKTHTNSRDLKTAIEKITQRGGLSNVGRAISFVTKNFFSKANGNRSGAPNVVVVMVDGWPTDKVEEASRLARESGINIFFITIEGAAENEKQYVVEPNFANKAVCRTNGFYSLHVQSWFGLHKTLQPLVKRVCDTDRLACSKTCLNSADIGFVIDGSSSVGTGNFRTVLQFVTNLTKEFEISDTDTRIGAVQYTYEQRLEFGFDKYSSKPDILNAIKRVGYWSGGTSTGAAINFALEQLFKKSKPNKRKLMILITDGRSYDDVRIPAMAAHLKGVITYAIGVAWAAQEELEVIATHPARDHSFFVDEFDNLHQYVPRIIQNICTEFNSQPRN

SEQ ID NO: 38111 - protein, 134 aa, Homo sapiens
  REGION 1..134: note = ENSP00000419251
  VARIANT 1: note = Any amino acid
XTSSQNRPRADPGIQRQDPSGAAFQKPVGADVSLGLVPKEELSTQSLEPVSLGDPNCKIDLSFLIDGSTSIGKRRFRIQKQLLADVAQALDIGPAGPLMGVVQYGPLHWYWKNSPGNGEEWVGRETAPISQLST

SEQ ID NO: 38112 - protein, 678 aa, Homo sapiens
  REGION 1..678: note = ENSP00000374625
MRTVVLTMKASVIEMFLVLLVTGVHSNKETAKKIKRPKFTVPQINCDVKAGKIIDPEFIVKCPAGCQDPKYHVYGTDVYASYSSVCGAAVHSGVLDNSGGKILVRKVAGQSGYKGSYSNGVQSLSLPRWRESFIVLESKPKKGVTYPSALTYSSSKSPAAQAGETTKAYQRPPIPGTTAQPVTLMQLLAVTVAVATPTTLPRPSPSAASTTSIPRPQSVGHRSQEMDLWSTATYTSSQNRPRADPGIQRQDPSGAAFQKPVGADVSLGLVPKEELSTQSLEPVSLGDPNCKIDLSFLIDGSTSIGKRRFRIQKQLLADVAQALDIGPAGPLMGVVQYGDNPATHFNLKTHTNSRDLKTAIEKITQRGGLSNVGRAISFVTKNFFSKANGNRSGAPNVVVVMVDGWPTDKVEEASRLARESGINIFFITIEGAAENEKQYVVEPNFANKAVCRTNGFYSLHVQSWFGLHKTLQPLVKRVCDTDRLACSKTCLNSADIGFVIDGSSSVGTGNFRTVLQFVTNLTKEFEISDTDTRIGAVQYTYEQRLEFGFDKYSSKPDILNAIKRVGYWSGGTSTGAAINFALEQLFKKSKPNKRKLMILITDGRSYDDVRIPAMAAHLKGVITYAIGVAWAAQEELEVIATHPARDHSFFVDEFDNLHQYVPRIIQNICTEFNSQPRN

SEQ ID NO: 38113 - protein, 406 aa, Homo sapiens
  REGION 1..406: note = ENSP00000262291
MAENGKNCDQRRVAMNKEHHNGNFTDPSSVNEKKRREREERQNIVLWRQPLITLQYFSLEILVILKEWTSKLWHRQSIVVSFLLLLAVLIATYYVEGVHQQYVQRIEKQFLLYAYWIGLGILSSVGLGTGLHTFLLYLGPHIASVTLAAYECNSVNFPEPPYPDQIICPDEEGTEGTISLWSIISKVRIEACMWGIGTAIGELPPYFMARAARLSGAEPDDEEYQEFEEMLEHAESAQDFASRAKLAVQKLVQKVGFFGILACASIPNPLFDLAGITCGHFLVPFWTFFGATLIGKAIIKMHIQKIFVIITFSKHIVEQMVAFIGAVPGIGPSLQKPFQEYLEAQRQKLHHKSEMGTPQGENWLSWMFEKLVVVMVCYFILSIINSMAQSYAKRIQQRLNSEEKTK

SEQ ID NO: 38114 - protein, 74 aa, Homo sapiens
  REGION 1..74: note = ENSP00000465972
MAENGKNCDQRRVAMNKEHHNGNFTDPSSVNEKKRREREERQNIVLWRQPLITLQYFSLEILVILKEWTSKVHI

SEQ ID NO: 38115 - protein, 44 aa, Homo sapiens
  REGION 1..44: note = ENSP00000466579
MAENGKNCDQRRVAMNKEHHNGNFTDYGIVKALWCLFYCCLLCL

SEQ ID NO: 38116 - protein, 75 aa, Homo sapiens
  REGION 1..75: note = ENSP00000465947
MAENGKNCDQRRVAMNKEHHNGNFTDPSSVNEKKRREREERQNIVLWRQPLITLQYFSLEILVILKEWTSNMCNV

SEQ ID NO: 38117 - protein, 44 aa, Homo sapiens
  REGION 1..44: note = ENSP00000466413
MWGIGTAIGELPPYFMARAARLSGAEPDDEEYQEFEEMLEHAES

SEQ ID NO: 38118 - protein, 167 aa, Homo sapiens
  REGION 1..167: note = ENSP00000466198
MAENGKNCDQRRVAMNKEHHNGNFTDPSSVNEKKRREREERQNIVLWRQPLITLQYFSLEILVILKEWTSKLWHRQSIVVSFLLLLAVLIATYYVEGVHQQYVQRIEKQFLLYAYWIGLGILSSVGLGTGLHTFLLYLIICPDEEGTEGTISLWSIISKVRIEACMW

SEQ ID NO: 38119 - protein, 78 aa, Homo sapiens
  REGION 1..78: note = ENSP00000467093
MAENGKNCDQRRVAMNKEHHNGNFTDPSSVNEKKRREREERQNIVLWRQPLITLQYFSLEILVILKEWTSKLWHRQSI

SEQ ID NO: 38120 - protein, 138 aa, Homo sapiens
  REGION 1..138: note = ENSP00000466511
MAENGKNCDQRRVAMNKEHHNGNFTDPSSVNEKKRREREERQNIVLWRQPLITLQYFSLEILVILKEWTSKLWHRQSIVVSFLLLLAVLIATYYVEGVHQQYVQRIEKQFLLYAYWIGLGILSSVGLGTGLHTFLLYL

SEQ ID NO: 38121 - protein, 92 aa, Homo sapiens
  REGION 1..92: note = ENSP00000465397
MAENGKNCDQRRVAMNKEHHNGNFTDPSSVNEKKRREREERQNIVLWRQPLITLQYFSLEILVILKEWTSKLWHRQSIVVSFLLLLAVLIAT

SEQ ID NO: 38122 - protein, 58 aa, Homo sapiens
  REGION 1..58: note = ENSP00000465911
  VARIANT 1: note = Any amino acid
XPSSVNEKKRREREERQNIVLWRQPLITLQYFSLEILVILKEWTSKTLPPGPNWQFKN

SEQ ID NO: 38123 - protein, 225 aa, Homo sapiens
  REGION 1..225: note = ENSP00000467350
GIGTAIGELPPYFMARAARLSGAEPDDEEYQEFEEMLEHAESAQDFASRAKLAVQKLVQKVGFFGILACASIPNPLFDLAGITCGHFLVPFWTFFGATLIGKAIIKMHIQKIFVIITFSKHIVEQMVAFIGLEDNGALQPPPPSAVPGIGPSLQKPFQEYLEAQRQKLHHKSEMGTPQGENWLSWMFEKLVVVMVCYFILSIINSMAQSYAKRIQQRLNSEEKTK

SEQ ID NO: 38124 - protein, 285 aa, Homo sapiens
  REGION 1..285: note = ENSP00000267202
MAGAGSEARFAGLSLVQLNELLEDEGQLTEMVQKMEETQNVQLNKEMTLASNRSLAEGNLLYQPQLDTLKARLTQKYQELQVLFEAYQIKKTKLDRQSSSASLETLLALLQAEGAKIEEDTENMAEKFLDGELPLDSFIDVYQSKRKLAHMRRVKIEKLQEMVLKGQRLPQALAPLPPRLPELAPTAPLPYPAPEASGPPAVAPRRIPPPPPPVPAGRLATPFTAAMSSGQAVPYPGLQCPPLPPRVGLPTQQGFSSQFVSPYPPPLPQRPPPRLPPHQPGFILQ

SEQ ID NO: 38125 - protein, 271 aa, Homo sapiens
  REGION 1..271: note = ENSP00000446075
MAGAGSEARFAGLSLVQLNELLEDEGQLTEMVQKMEENVQLNKEMTLASNRSLAEGNLLYQPQLDTLKARLTQKYQELQVLFEAYQIKKTKLDRQSSSASLETLLALLQAEGAKIEEDTENMAEKFLDGELPLDSFIDVYQSKRKLAHMRRVKIEKLQEMVLKGQRLPQALAPLPPRLPELAPTAPLPYPAPEASGPPAVAPRRIPPPPPPVPAGRLATPFTAAMSSGQAVPYPGLQCPPLPPRVGLPTQQGFSSQFVSPYPPPLPQRPPP

SEQ ID NO: 38126 - protein, 184 aa, Homo sapiens
  REGION 1..184: note = ENSP00000360294
MQSGCVLELRNAGLVACLALITVFVAECCYGDSCQTQNVQLNKEMTLASNRSLAEGNLLYQPQLDTLKARLTQKYQELQVLFEAYQIKKTKLDRQSSSASLETLLALLQAEGAKIEEDTENMAEKFLDGELPLDSFIDVYQSKRKLAHMRRVKIEKLQEMVLKGQRLPQALAPLPPRLPELAPT

SEQ ID NO: 38127 - protein, 327 aa, Homo sapiens
  REGION 1..327: note = ENSP00000318684
MAELPGPFLCGALLGFLCLSGLAVEVKVPTEPLSTPLGKTAELTCTYSTSVGDSFALEWSFVQPGKPISESHPILYFTNGHLYPTGSKSKRVSLLQNPPTVGVATLKLTDVHPSDTGTYLCQVNNPPDFYTNGLGLINLTVLVPPSNPLCSQSGQTSVGGSTALRCSSSEGAPKPVYNWVRLGTFPTPSPGSMVQDEVSGQLILTNLSLTSSGTYRCVATNQMGSASCELTLSVTEPSQGRVAGALIGVLLGVLLLSVAAFCLVRFQKERGKKPKETYGGSDLREDAIAPGISEHTCMRADSSKGFLERPSSASTVTTTKSKLPMVV

SEQ ID NO: 38128 - protein, 284 aa, Homo sapiens
  REGION 1..284: note = ENSP00000385013
MAELPGPFLCGALLGFLCLSGLAVEVKVPTEPLSTPLGKTAELTCTYSTSVGDSFALEWSFVQPGKPISESHPILYFTNGHLYPTGSKSKRVSLLQNPPTVGVATLKLTDVHPSDTGTYLCQVNNPPDFYTNGLGLINLTVLVPPSNPLCSQSGQTSVGGSTALRCSSSEGAPKPVYNWVRLGTFPTPSPGSMVQDEVSGQLILTNLSLTSSGTYRCVATNQMGSASCELTLSVTEPSQGRVAGALIGVLLGVLLLSVAAFCLVRFQKERGKKPKETYGGSDLR

SEQ ID NO: 38129 - protein, 414 aa, Homo sapiens
  REGION 1..414: note = ENSP00000357080
MRVGGAFHLLLVCLSPALLSAVRINGDGQEVLYLAEGDNVRLGCPYVLDPEDYGPNGLDIEWMQVNSDPAHHRENVFLSYQDKRINHGSLPHLQQRVRFAASDPSQYDASINLMNLQVSDTATYECRVKKTTMATRKVIVTVQARPAVPMCWTEGHMTYGNDVVLKCYASGGSQPLSYKWAKISGHHYPYRAGSYTSQHSYHSELSYQESFHSSINQGLNNGDLVLKDISRADDGLYQCTVANNVGYSVCVVEVKVSDSRRIGVIIGIVLGSLLALGCLAVGIWGLVCCCCGGSGAGGARGAFGYGNGGGVGGGACGDLASEIREDAVAPGCKASGRGSRVTHLLGYPTQNVSRSLRRKYAPPPCGGPEDVALAPCTAAAACEAGPSPVYVKVKSAEPADCAEGPVQCKNGLLV

SEQ ID NO: 38130 - protein, 191 aa, Homo sapiens
  REGION 1..191: note = ENSP00000384014
MGKQNSKLAPEVMEDLVKSTEFNEHELKQWYKGFLKDCPSGRLNLEEFQQLYVKFFPYGDASKFAQHAFRTFDKNGDGTIDFREFICALSITSRGSFEQKLNWAFNMYDLDGDGKITRVEMLEIIEAIYKMVGTVIMMKMNEDGLTPEQRVDKIFSKMDKNKDDQITLDEFKEAAKSDPSIVLLLQCDIQK

SEQ ID NO: 38131 - protein, 118 aa, Homo sapiens
  REGION 1..118: note = ENSP00000405511
MGKQNSKLAPEVMEDLVKSTEFNEHELKQWYKGFLKDCPSGRLNLEEFQQLYVKFFPYGDASKFAQHAFRTFDKNGDGTIDFREFICALSITSRGSFEQKLNWAFNMYDLDGDGKITR

SEQ ID NO: 38132 - protein, 191 aa, Homo sapiens; identical to SEQ ID NO: 38130
  REGION 1..191: note = ENSP00000295156

SEQ ID NO: 38133 - protein, 104 aa, Homo sapiens
  REGION 1..104: note = ENSP00000390124
MGKQNSKLAPEVMEDLVKSTEFNEHELKQWYKGFLKDCPSGRLNLEEFQQLYVKFFPYGDASKFAQHAFRTFDKNGDGTIDFREFICALSITSRGSFEQKLNWA

SEQ ID NO: 38134 - protein, 191 aa, Homo sapiens; identical to SEQ ID NO: 38130
  REGION 1..191: note = ENSP00000384719

SEQ ID NO: 38135 - protein, 285 aa, Homo sapiens
  REGION 1..285: note = ENSP00000335038
MEQRNRLGALGYLPPLLLHALLLFVADAAFTEVPKDVTVREGDDIEMPCAFRASGATSYSLEIQWWYLKEPPRELLHELALSVPGARSKVTNKDATKISTVRVQGNDISHRLRLSAVRLQDEGVYECRVSDYSDDDTQEHKAQAMLRVLSRFAPPNMQAAEAVSHIQSSGPRRHGPASAANANNAGAASRTTSEPGRGDKSPPPGSPPAAIDPAVPEAAAASAAHTPTTTVAAAAAASSASPPSGQAVLLRQRHGSGTGRSYTTDPLLSLLLLALHKFLRLLLGH

SEQ ID NO: 38136 - protein, 478 aa, Homo sapiens
  REGION 1..478: note = ENSP00000226218
MAPLRPLLILALLAWVALADQESCKGRCTEGFNVDKKCQCDELCSYYQSCCTDYTAECKPQVTRGDVFTMPEDEYTVYDDGEEKNNATVHEQVGGPSLTSDLQAQSKGNPEQTPVLKPEEEAPAPEVGASKPEGIDSRPETLHPGRPQPPAEEELCSGKPFDAFTDLKNGSLFAFRGQYCYELDEKAVRPGYPKLIRDVWGIEGPIDAAFTRINCQGKTYLFKGSQYWRFEDGVLDPDYPRNISDGFDGIPDNVDAALALPAHSYSGRERVYFFKGKQYWEYQFQHQPSQEECEGSSLSAVFEHFAMMQRDSWEDIFELLFWGRTSAGTRQPQFISRDWHGVPGQVDAAMAGRIYISGMAPRPSLAKKQRFRHRNRKGYRSQRGHSRGRNQNSRRPSRATWLSLFSSEESNLGANNYDDYRMDWLVPATCEPIQSVFFFSGDKYYRVNLRTRRVDTVDPPYPRSIAQYWLGCPAPGHL

SEQ ID NO: 38137 - protein, 118 aa, Homo sapiens
  REGION 1..118: note = ENSP00000440439
MAPLRPLLILALLAWVALADQESCKGRCTEGFNVDKKCQCDELCSYYQSCCTDYTAECKPQVTRGDVFTMPEDEYTVYDDGEEKNNATVHEQVGGPSLTSDLQAQSKGNPEQTPVLKP

SEQ ID NO: 38138 - protein, 786 aa, Homo sapiens
  REGION 1..786: note = ENSP00000407726
MVHFCGLLTLHREPVPLKSISVSVNIYEFVAGVSATLNYENEEKVPLEAFFVFPMDEDSAVYSFEALVDGKKIVAELQDKMKARTNYEKAISQGHQAFLLEGDSSSRDVFSCNVGNLQPGSKAAVTLKYVQELPLEADGALRFVLPAVLNPRYQFSGSSKDSCLNVKTPIVPVEDLPYTLSMVATIDSQHGIEKVQSNCPLSPTEYLGEDKTSAQVSLAAGHKFDRDVELLIYYNEVHTPSVVLEMGMPNMKPGHLMGDPSAMVSFYPNIPEDQPSNTCGEFIFLMDRSGSMQSPMSSQDTSQLRIQAAKETLILLLKSLPIGCYFNIYGFGSSYEACFPESVKYTQQTMEEALGRVKLMQADLGGTEILAPLQNIYRGPSIPGHPLQLFVFTDGEVTDTFSVIKEVRINRQKHRCFSFGIGEGTSTSLIKGIARASGGTSEFITGKDRMQSKALRTLKRSLQPVVEDVSLSWHLPPGLSAKMLSPEQTVIFRGQRLISYAQLTGRMPAAETTGEVCLKYTLQGKTFEDKVTFPLQPKPDVNLTIHRLAAKSLLQTKDMGLRETPASDKKDALNLSLESGVISSFTAFIAINKELNKPVQGPLAHRDVPRPILLGASAPLKIKCQSGFRKALHSDRPPSASQPRGELMCYKAKTFQMDDYSLCGLISHKDQHSPGFGENHLVQLIYHQNANGSWDLNEDLAKILGMSLEEIMAAQPAELVDSSGWATILAVIWLHSNGKDLKCEWELLERKAVAWMRAHAGSTMPSVVKAAITFLKSSVDPAIFAF

SEQ ID NO: 38139 - protein, 415 aa, Homo sapiens
  REGION 1..415: note = ENSP00000355070
MVHFCGLLTLHREPVPLKSISVSVNIYEFVAGVSATLNYENEEKVPLEAFFVFPMDEDSAVYSFEALVDGKKIVAELQDKMKARTNYEKAISQGHQAFLLEGDSSSRDVFSCNVGNLQPGSKAAVTLKYVQELPLEADGALRFVLPAVLNPRYQFSGSSKDSCLNVKTPIVPVEDLPYTLSMVATIDSQHGIEKVQSNCPLSPTEYLGEDKTSAQVSLAAGHKFDRDVELLIYYNEVHTPSVVLEMGMPNMKPGHLMGDPSAMVSFYPNIPEDQPSNTCGEFIFLMDRSGSMQSPMSSQDTSQLRIQAAKETLILLLKSLPIGCYFNIYGFGSSYEACFPESVKYTQQTMEEALGRVKLMQADLGGTEILAPLQNIYRGPSIPGHPLQLFVFTDGEVTDTFSVIKEVRINRQKHR

SEQ ID NO: 38140 - protein, 415 aa, Homo sapiens; identical to SEQ ID NO: 38139
  REGION 1..415: note = ENSP00000404683

SEQ ID NO: 38141 - protein, 431 aa, Homo sapiens
  REGION 1..431: note = ENSP00000376501
MSSVCDMSFLQKSCITMVHFCGLLTLHREPVPLKSISVSVNIYEFVAGVSATLNYENEEKVPLEAFFVFPMDEDSAVYSFEALVDGKKIVAELQDKMKARTNYEKAISQGHQAFLLEGDSSSRDVFSCNVGNLQPGSKAAVTLKYVQELPLEADGALRFVLPAVLNPRYQFSGSSKDSCLNVKTPIVPVEDLPYTLSMVATIDSQHGIEKVQSNCPLSPTEYLGEDKTSAQVSLAAGHKFDRDVELLIYYNEVHTPSVVLEMGMPNMKPGHLMGDPSAMVSFYPNIPEDQPSNTCGEFIFLMDRSGSMQSPMSSQDTSQLRIQAAKETLILLLKSLPIGCYFNIYGFGSSYEACFPESVKYTQQTMEEALGRVKLMQADLGGTEILAPLQNIYRGPSIPGHPLQLFVFTDGEVTDTFSVIKEVRINRQKHR

SEQ ID NO: 38142 - protein, 786 aa, Homo sapiens; identical to SEQ ID NO: 38138
  REGION 1..786: note = ENSP00000376504

SEQ ID NO: 38143 - protein, 1242 aa, Homo sapiens
  REGION 1..1242: note = ENSP00000398688
MPGLYCPSSWTPLPLTDSWVRACANGPCLSVRARLTYRNPQPQPVDGVFVYPLAEAEVVSGFEAEAAGRRVSFQLQSRRRSQAACCRALGPGLGTPTPRRCAQGHLVLDLAQARSTLVLPTGIIAAAGTMTVTLHSSRELPSRPDGVLHVALPTVLTPLAPPGPPGPPRPPGLCDDSPTSCFGVGSLQEEGLAWEELAAPRDVFSGPARCPAPYTFSFEMLVTGPCLLAGLESPSHALRADAPPHASSAATICVTLAEGHHCDRALEILLHPSEPHQPHLMLEGGSLSSAEYEARVRARRDFQRLQRRDSDGDRQVWFLQRRFHKDILLNPVLALSFCPDLSSKPGHLGTATRELLFLLDSSSVAHKDAIVLAVKSLPPQTLINLAVFGTLVQPLFPESRPCSDDAVQLICESIETLQVPSGPPDVLAALDWAVGQPQHRAYPRQLFLLTAASPMAATTHRTLELMRWHRGTARCFSFGLGPTCHQLLQGLSALSRGQAYFLRPGQRLQPMLVQALRKALEPALSDISVDWFVPDTVEALLTPREIPALYPGDQLLGYCSLFRVDGFRSRPPGGQEPGWQSSGGSVFPSPEEAPSAASPGTEPTGTSEPLGTGTVSAELSSPWAARDSEQSTDALTDPVTDPGPNPSDTAIWRRIFQSSYIREQYVLTHCSASPEPGPGSTGSSESPGSQGPGSPEGSAPLEPPSQQGCRSLAWGEPAGSRSCPLPAPTPAPFKVGALSTEVLGRQHRAALAGRSLSSPPGRANQVPGRPRKPSLGAILDGPSPEPGQQLGQGLDDSGNLLSPAPMDWDMLMEPPFLFTAVPPSGELAPPAVPPQAPRCHVVIRGLCGEQPMCWEVGVGLETLWGPGDGSQPPSPPVREAAWDQALHRLTAASVVRDNEQLALRGGAETTADRGHARRCWLRALQTSKVSSAPSCFTCPVAVDATTREVLPGALQVCSSEPAEPPGTPPASHSHLDAAPLPTVVYSKGLQRGSPAGAWDSDQNGNSKRALGDPATPTEGPRRPPPRPPCRLSMGRRHKLCSPDPGQANNSEGSDHDYLPLVRLQEAPGSFRLDAPFCAAVRISQERLCRASPFAVHRASLSPTSASLPWALLGPGVGQGDSATASCSPSPSSGSEGPGQVDSGRGSDTEASEGAEGLGGTDLRGRTWATAVALAWLEHRCAAAFDEWELTAAKADCWLRAQHLPDGLDLAALKAAARGLFLLLRHWDQNLQLHLLCYSPANV

SEQ ID NO: 38144 - protein, 1024 aa, Homo sapiens
  REGION 1..1024: note = ENSP00000273794
MLVTGPCLLAGLESPSHALRADAPPHASSAATICVTLAEGHHCDRALEILLHPSEPHQPHLMLEGGSLSSAEYEARVRARRDFQRLQRRDSDGDRQVWFLQRRFHKDILLNPVLALSFCPDLSSKPGHLGTATRELLFLLDSSSVAHKDAIVLAVKSLPPQTLINLAVFGTLVQPLFPESRPCSDDAVQLICESIETLQVPSGPPDVLAALDWAVGQPQHRAYPRQLFLLTAASPMAATTHRTLELMRWHRGTARCFSFGLGPTCHQLLQGLSALSRGQAYFLRPGQRLQPMLVQALRKALEPALSDISVDWFVPDTVEALLTPREIPALYPGDQLLGYCSLFRVDGFRSRPPGGQEPGWQSSGGSVFPSPEEAPSAASPGTEPTGTSEPLGTGTVSAELSSPWAARDSEQTGTDALTDPVTDPGPNPSDTAIWRRIFQSSYIREQYVLTHCSASPEPGPGSTGSSESPGSQGPGSPEGSAPLEPPSQQGCRSLAWGEPAGSRSCPLPAPTPAPFKVGALSTEVLGRQHRAALAGRSLSSPPGRANQVPGRPRKPSLGAILDGPSPEPGQQLGQGLDDSGNLLSPAPMDWDMLMEPPFLFTAVPPSGELAPPAVPPQAPRCHVVIRGLCGEQPMCWEVGVGLETLWGPGDGSQPPSPPVREAAWDQALHRLTAASVVRDNEQLALRGGAETTADRGHARRCWLRALQTSKVSSAPSCFTCPVAVDATTREVLPGALQVCSSEPAEPPGTPPASHSHLDAAPLPTVVYSKGLQRGSPAGAWDSDQNGNSKRALGDPATPTEGPRRPPPRPPCRLSMGRRHKLCSPDPGQANNSEGSDHDYLPLVRLQEAPGSFRLDAPFCAAVRISQERLCRASPFAVHRASLSPTSASLPWALLGPGVGQGDSATASCSPSPSSGSEGPGQVDSGRGSDTEASEGAEGLGGTDLRGRTWATAVALAWLEHRCAAAFDEWELTAAKADCWLRAQHLPDGLDLAALKAAARGLFLLLRHWDQNLQLHLLCYSPANV

SEQ ID NO: 38145 - protein, 325 aa, Homo sapiens
  REGION 1..325: note = ENSP00000341819
MPSSTAMAVGALSSSLLVTCCLMVALCSPSIPLEKLAQAPEQPGQEKREHASRDGPGRVNELGRPARDEGGSGRDWKSKSGRGLAGREPWSKLKQAWVSQGGGAKAGDLQVRPRGDTPQAEALAAAAQDAIGPELAPTPEPPEEYVYPDYRGKGCVDESGFVYAIGEKFAPGPSACPCLCTEEGPLCAQPECPRLHPRCIHVDTSQCCPQCKERKNYCEFRGKTYQTLEEFVVSPCERCRCEANGEVLCTVSACPQTECVDPVYEPDQCCPICKNGPNCFAETAVIPAGREVKTDECTICHCTYEEGTWRIERQAMCTRHECRQM

SEQ ID NO: 38146 - protein, 598 aa, Homo sapiens
  REGION 1..598: note = ENSP00000329654
MASLRRVKVLLVLNLIAVAGFVLFLAKCRPIAVRSGDAFHEIRPRAEVANLSAHSASPIQDAVLKRLSLLEDIVYRQLNGLSKSLGLIEGYGGRGKGGLPATLSPAEEEKAKGPHEKYGYNSYLSEKISLDRSIPDYRPTKCKELKYSKDLPQISIIFIFVNEALSVILRSVHSAVNHTPTHLLKEIILVDDNSDEEELKVPLEEYVHKRYPGLVKVVRNQKREGLIRARIEGWKVATGQVTGFFDAHVEFTAGWAEPVLSRIQENRKRVILPSIDNIKQDNFEVQRYENSAHGYSWELWCMYISPPKDWWDAGDPSLPIRTPAMIGCSFVVNRKFFGEIGLLDPGMDVYGGENIELGIKVWLCGGSMEVLPCSRVAHIERKKKPYNSNIGFYTKRNALRVAEVWMDDYKSHVYIAWNLPLENPGIDIGDVSERRALRKSLKCKNFQWYLDHVYPEMRRYNNTVAYGELRNNKAKDVCLDQGPLENHTAILYPCHGWGPQLARYTKEGFLHLGALGTTTLLPDTRCLVDNSKSRLPQLLDCDKVKSSLYKRWNFIQNGAIMNKGTGRCLEVENRGLAGIDLILRSCTGQRWTIKNSIK

SEQ ID NO: 38147 - protein, 188 aa, Homo sapiens
  REGION 1..188: note = ENSP00000392019
LLDFKTKTTPPLGVLADTERGLSVFPPVSLSATAEMADLFRITDWGMFMSLDRITNGGLSKSLGLIEGYGGRGKGGLPATLSPAEEEKAKGPHEKYGYNSYLSEKISLDRSIPDYRPTKCKELKYSKDLPQISIIFIFVNEALSVILRSVHSAVNHTPTHLLKEIILVDDNSDEEELKVPLEEYVHKR

SEQ ID NO: 38148 - protein, 519 aa, Homo sapiens
  REGION 1..519: note = ENSP00000479090
GLSKSLGLIEGYGGRGKGGLPATLSPAEEEKAKGPHEKYGYNSYLSEKISLDRSIPDYRPTKCKELKYSKDLPQISIIFIFVNEALSVILRSVHSAVNHTPTHLLKEIILVDDNSDEEELKVPLEEYVHKRYPGLVKVVRNQKREGLIRARIEGWKVATGQVTGFFDAHVEFTAGWAEPVLSRIQENRKRVILPSIDNIKQDNFEVQRYENSAHGYSWELWCMYISPPKDWWDAGDPSLPIRTPAMIGCSFVVNRKFFGEIGLLDPGMDVYGGENIELGIKVWLCGGSMEVLPCSRVAHIERKKKPYNSNIGFYTKRNALRVAEVWMDDYKSHVYIAWNLPLENPGIDIGDVSERRALRKSLKCKNFQWYLDHVYPEMRRYNNTVAYGELRNNKAKDVCLDQGPLENHTAILYPCHGWGPQLARYTKEGFLHLGALGTTTLLPDTRCLVDNSKSRLPQLLDCDKVKSSLYKRWNFIQNGAIMNKGTGRCLEVENRGLAGIDLILRSCTGQRWTIKNSIK

SEQ ID NO: 38149 - protein, 265 aa, Homo sapiens
  REGION 1..265: note = ENSP00000316775
MEALPPVRSSLLGILLQVTRLSVLLVQNRDHLYNFLLLKINLFNHWVSGLAQEARGSCNWQAHLPLGAAACPLGQALWAGLALIQVPVWLVLQGPRLMWAGMWGSTKGLGLALLSAWEQLGLSVAIWTDLFLSCLHGLMLVALLLVVVTWRVCQKSHCFRLGRQLSKALQVNCVVRKLLVQLRRLYWWVETMTALTSWHLAYLITWTTCLASHLLQAAFEHTTQLAEAQEVEPQEVSGSSLLPSLSASSDSESGTVLPEQETPRE

SEQ ID NO: 38150 - protein, 60 aa, Homo sapiens
  REGION 1..60: note = ENSP00000403621
MEALPPVRSSLLGILLQVTRLSVLRQGLALSPSLERSGAGSARCSLQLPVSSNPPPSASK

SEQ ID NO: 38151 - protein, 1283 aa, Homo sapiens
  REGION 1..1283: note = ENSP00000422763
MSQVRQVGLLAAGCQPWNKDVCAASGDRFAYCATLAIYIYQLDHRYNEFKLHAIMSEHKKTITAISWCPHNPDLFASGSTDNLVIIWNVAEQKVIAKLDSTKGIPASLSWCWNAEDVVAFVSHRGPLFIWTISGPDSGVIVHKDAHSFLSDICMFRWHTHQKGKVVFGHIDGSLSIFHPGNKNQKHVLRPESLEGTDEEDPVTALEWDPLSTDYLLVVNLHYGIRLVDSESLSCITTFNLPSAAASVQCLAWVPSAPGMFITGDSQVGVLRIWNVSRTTPIDNLKLKKTGFHCLHVLNSPPRKKFSVQSPTKNHYTSSTSEAVPPPTLTQNQAFSLPPGHAVCCFLDGGVGLYDMGAKKWDFLRDLGHVETIFDCKFKPDDPNLLATASFDGTIKVWDINTLTAVYTSPGNEGVIYSLSWAPGGLNCIAGGTSRNGAFIWNVQKGKIIQRFNEHGTNGIFCIAWSHKDSKRIATCSSDGFCIIRTIDGKVLHKYKHPAAVFGCDWSQNNKDMIATGCEDTNVRVYYVATSSDQPLKVFSGHTAKVFHVKWSPLREGILCSGSDDGTVRIWDYTQDACINILNGHTAPVRGLMWNTEIPYLLISGSWDYTIKVWDTREGTCVDTVYDHGADVYGLTCHPSRPFTMASCSRDSTVRLWSLTALVTPVQINILADRSWEEIIGNTDYAIEPGTPPLLCGKVSRDIRQEIEKLTANSQVKKLRWFSECLSPPGGSDNLWNLVAVIKGQDDSLLPQNYCKGIMHLKHLIKFRTSEAQELTTVKMSKFGGGIGVPAKEERLKEAAEIHLRLGQIQRYCELMVELGEWDKALSIAPGVSVKYWKKLMQRRADQLIQEDKDDVIPYCIAIGDVKKLVHFFMSRGQLKEALLVAQAACEGNMQPLHVSVPKGASYSDDIYKEDFNELLHKVSKELAEWYFQDGRAVLAACCHLAIDNIELAMAYLIRGNELELAVCVGTVLGESAAPATHYALELLARKCMMISVWNLAADLLLMIPDNELHLIKLCAFYPGCTEEINDLHDKCKLPTVEECMQLAETARADDNIFETVKYYLLSQEPEKALPIGISFVKEYISSSDWTLDTIYPVLDLLSYIRTEKLLLHTCTEARNELLILCGYIGALLAIRRQYQSIVPALYEYTSQLLKRREVSVPLKIEYLSEELDAWRACTQSTNRSLEDSPYTPPSDSQRMIYATLLKRLKEESLKGIIGPDYVTGSNLPSHSDIHISCLTGLKIQGPVFFLEDGKSAISLNDALMWAKVNPFSPLGTGIRLNPF

SEQ ID NO: 38152 - protein, 1322 aa, Homo sapiens
  REGION 1..1322: note = ENSP00000280190
MAWMTYISNWFEQDDWYEGLQRANMSQVRQVGLLAAGCQPWNKDVCAASGDRFAYCATLAIYIYQLDHRYNEFKLHAIMSEHKKTITAISWCPHNPDLFASGSTDNLVIIWNVAEQKVIAKLDSTKGIPASLSWCWNAEDVVAFVSHRGPLFIWTISGPDSGVIVHKDAHSFLSDICMFRWHTHQKGKVVFGHIDGSLSIFHPGNKNQKHVLRPESLEGTDEEDPVTALEWDPLSTDYLLVVNLHYGIRLVDSESLSCITTFNLPSAAASVQCLAWVPSAPGMFITGDSQVGVLRIWNVSRTTPIDNLKLKKTGFHCLHVLNSPPRKKFSVQSPTKNHYTSSTSEAVPPPTLTQNQAFSLPPGHAVCCFLDGGVGLYDMGAKKWDFLRDLGHVETIFDCKFKPDDPNLLATASFDGTIKVWDINTLTAVYTSPGNEGVIYSLSWAPGGLNCIAGGTSRNGAFIWNVQKGKIIQRFNEHGTNGIFCIAWSHKDSKRIATCSSDGFCIIRTIDGKVLHKYKHPAAVFGCDWSQNNKDMIATGCEDTNVRVYYVATSSDQPLKVFSGHTAKVFHVKWSPLREGILCSGSDDGTVRIWDYTQDACINILNGHTAPVRGLMWNTEIPYLLISGSWDYTIKVWDTREGTCVDTVYDHGADVYGLTCHPSRPFTMASCSRDSTVRLWSLTALVTPVQINILADRSWEEIIGNTDYAIEPGTPPLLCGKVSRDIRQEIEKLTANSQVKKLRWFSECLSPPGGSDNLWNLVAVIKGQDDSLLPQNYCKGIMHLKHLIKFRTSEAQELTTVKMSKFGGGIGVPAKEERLKEAAEIHLRLGQIQRYCELMVELGEWDKALSIAPGVSVKYWKKLMQRRADQLIQEDKDDVIPYCIAIGDVKKLVHFFMSRGQLKEALLVAQAACEGNMQPLHVSVPKGASYSDDIYKEDFNELLHKVSKELAEWYFQDGRAVLAACCHLAIDNIELAMAYLIRGNELELAVCVGTVLGESAAPATHYALELLARKCMMISVCFPCVGYSVPFCYVNRNLAADLLLMIPDNELHLIKLCAFYPGCTEEINDLHDKCKLPTVEECMQLAETARADDNIFETVKYYLLSQEPEKALPIGISFVKEYISSSDWTLDTIYPVLDLLSYIRTEKLLLHTCTEARNELLILCGYIGALLAIRRQYQSIVPALYEYTSQLLKRREVSVPLKIEYLSEELDAWRACTQSTNRSLEDSPYTPPSDSQRMIYATLLKRLKEESLKGIIGPDYVTGSNLPSHSDIHISCLTGLKIQGPVFFLEDGKSAISLNDALMWAKVNPFSPLGTGIRLNPF

SEQ ID NO: 38153 - protein, 1297 aa, Homo sapiens
  REGION 1..1297: note = ENSP00000422200
MAWMTYISNWFEQDDWYEGLQRANMSQVRQVGLLAAGCQPWNKDVCAASGDRFAYCATLAIYIYQLDHRYNEFKLHAIMSEHKKTITAISWCPHNPDLFASGSTDNLVIIWNVAEQKVIAKLDSTKGIPASLSWCWNAEDVVAFVSHRGPLFIWTISGPDSGVIVHKDAHSFLSDICMFRWHTHQKGKVVFGHIDGSLSIFHPDEEDPVTALEWDPLSTDYLLVVNLHYGIRLVDSESLSCITTFNLPSAAASVQCLAWVPSAPGMFITGDSQVGVLRIWNVSRTTPIDNLKLKKTGFHCLHVLNSPPRKKFSVQSPTKNHYTSSTSEAVPPPTLTQNQAFSLPPGHAVCCFLDGGVGLYDMGAKKWDFLRDLGHVETIFDCKFKPDDPNLLATASFDGTIKVWDINTLTAVYTSPGNEGVIYSLSWAPGGLNCIAGGTSRNGAFIWNVQKGKIIQRFNEHGTNGIFCIAWSHKDSKRIATCSSDGFCIIRTIDGKVLHKYKHPAAVFGCDWSQNNKDMIATGCEDTNVRVYYVATSSDQPLKVFSGHTAKVFHVKWSPLREGILCSGSDDGTVRIWDYTQDACINILNGHTAPVRGLMWNTEIPYLLISGSWDYTIKVWDTREGTCVDTVYDHGADVYGLTCHPSRPFTMASCSRDSTVRLWSLTALVTPVQINILADRSWEEIIGNTDYAIEPGTPPLLCGKVSRDIRQEIEKLTANSQVKKLRWFSECLSPPGGSDNLWNLVAVIKGQDDSLLPQNYCKGIMHLKHLIKFRTSEAQELTTVKMSKFGGGIGVPAKEERLKEAAEIHLRLGQIQRYCELMVELGEWDKALSIAPGVSVKYWKKLMQRRADQLIQEDKDDVIPYCIAIGDVKKLVHFFMSRGQLKEALLVAQAACEGNMQPLHVSVPKGASYSDDIYKEDFNELLHKVSKELAEWYFQDGRAVLAACCHLAIDNIELAMAYLIRGNELELAVCVGTVLGESAAPATHYALELLARKCMMISVCFPCVGYRNLAADLLLMIPDNELHLIKLCAFYPGCTEEINDLHDKCKLPTVEECMQLAETARADDNIFETVKYYLLSQEPEKALPIGISFVKEYISSSDWTLDTIYPVLDLLSYIRTEKLLLHTCTEARNELLILCGYIGALLAIRRQYQSIVPALYEYTSQLLKRREVSVPLKIEYLSEELDAWRACTQSTNRSLEDSPYTPPSDSQRMIYATLLKRLKEESLKGIIGPDYVTGSNLPSHSDIHISCLTGLKIQGPVFFLEDGKSAISLNDALMWAKVNPFSPLGTGIRLNPF

SEQ ID NO: 38154 - protein, 101 aa, Homo sapiens
  REGION 1..101: note = ENSP00000427502
MAWMTYISNWFEQDDWYEGLQRANMSQVRQVGLLAAGCQPWNKDVCAASGDRFAYCATLAIYIYQGSLLLLVGAGMQRMWWHLFPTEAHCSFGPSQDQIVE

SEQ ID NO: 38155 - protein, 226 aa, Homo sapiens
  REGION 1..226: note = ENSP00000426847
  VARIANT 1: note = Any amino acid
XIPASLSWCWNAEDVVAFVSHRGPLFIWTISGPDSGVIVHKDAHSFLSDICMFRWHTHQKGKVVFGHIDGSLSIFHPVSVQSPTKNHYTSSTSEAVPPPTLTQNQAFSLPPGHAVCCFLDGGVGLYDMGAKKWDFLRDLGHVETIFDCKFKPDDPNLLATASFDGTIKVWDINTLTAVYTSPGNEGVIYSLSWAPGGLNCIAGGTSRNGAFIWNVQKGKIIQRFNE

SEQ ID NO: 38156 - protein, 557 aa, Homo sapiens
  REGION 1..557: note = ENSP00000426985
  VARIANT 1: note = Any amino acid
XWNLVAVIKGQDDSLLPQNYCKGIMHLKHLIKFRTSEAQELTTVKMSKFGGGIGVPAKEERLKEAAEIHLRLGQIQRYCELMVELGEWDKALSIAPGVSVKYWKKLMQRRADQLIQEDKDDVIPYCIAIGDVKKLVHFFMSRGQLKEALLVAQAACEGNMQPLHVSVPKGASYSDDIYKEDFNELLHKVSKELAEWYFQDGRAVLAACCHLAIDNIELAMAYLIRGNELELAVCVGTVLGESAAPATHYALELLARKCMMISVCFPCVGYRNLAADLLLMIPDNELHLIKLCAFYPGCTEEINDLHDKCKLPTVEECMQLAETARADDNIFETVKYYLLSQEPEKALPIGISFVKEYISSSDWTLDTIYPVLDLLSYIRTEKLLLHTCTEARNELLILCGYIGALLAIRRQYQSIVPALYEYTSQLLKRREVSVPLKIEYLSEELDAWRACTQSTNRSLEDSPYTPPSDSQRMIYATLLKRLKEESLKGIIGPDYVTGSNLPSHSDIHISCLTGLKIQGPVFFLEDGKSAISLNDALMWAKVNPFSPLGTGIRLNPF

SEQ ID NO: 38157 - protein, 344 aa, Homo sapiens
  REGION 1..344: note = ENSP00000376139
MNLLPCNPHGNGLLYAGFNQDHGCFACGMENGFRVYNTDPLKEKEKQEFLEGGVGHVEMLFRCNYLALVGGGKKPKYPPNKVMIWDDLKKKTVIEIEFSTEVKAVKLRRDRIVVVLDSMIKVFTFTHNPHQLHVFETCYNPKGLCVLCPNSNNSLLAFPGTHTGHVQLVDLASTEKPPVDIPAHEGVLSCIALNLQGTRIATASEKGTLIRIFDTSSGHLIQELRRGSQAANIYCINFNQDASLICVSSDHGTVHIFAAEDPKRNKQSSLASASFLPKYFSSKWSFSKFQVPSGSPCICAFGTEPNAVIAICADGSYYKFLFNPKGECIRDVYAQFLEMTDDKL

SEQ ID NO: 38158 - protein, 201 aa, Homo sapiens
  REGION 1..201: note = ENSP00000461488
  VARIANT 1: note = Any amino acid
XHGNGLLYAGFNQDHGCFACGMENGFRVYNTDPLKEKEKQEFLEGGVGHVEMLFRCNYLALVGGGKKPKYPPNKVMIWDDLKKKTVIEIEFSTEVKAVKLRRDRIVVVLDSMIKVFTFTHNPHQLHVFETCYNPKGLCVLCPNSNNSLLAFPGTHTGHVQLVDLASTEKPPVDIPAHEGVLSCIALNLQGTRIATASEKGI

SEQ ID NO: 38159 - protein, 124 aa, Homo sapiens
  REGION 1..124: note = ENSP00000460297
  VARIANT 1: note = Any amino acid
XQELRRGSQAANIYCINFNQDASLICVSSDHGTVHIFAAEDPKRNKQSSLASASFLPKYFSSKWSFSKFQVPSGSPCICAFGTEPNAVIAICADGSYYKFLFNPKGECIRDVYAQFLEMTDDKL

SEQ ID NO: 38160 - protein, 174 aa, Homo sapiens
  REGION 1..174: note = ENSP00000458738
MNLLPCNPHGNGLLYAGFNQDHGCFACGMENGFRVYNTDPLKEKEKQVMIWDDLKKKTVIEIEFSTEVKAVKLRRDRIVVVLDSMIKVFTFTHNPHQLHVFETCYNPKGLCVLCPNSNNSLLAFPGTHTGHVQLVDLASTEKPPVDIPAHEGVLSCIALNLQGTRIATASEKGI

SEQ ID NO: 38161 - protein, 85 aa, Homo sapiens
  REGION 1..85: note = ENSP00000461355
MNLLPCNPHGNGLLYAGFNQDHGCFACGMENGFRVYNTDPLKEKEKQEFLEGGVGHVEMLFRCNYLALVGGGKKPKYPPNKGTEK

SEQ ID NO: 38162 - protein, 697 aa, Homo sapiens
  REGION 1..697: note = ENSP00000311343
MAWREKSKKRLNMTSFNIAQGIHAFDYHSRLNLIATAGINNKVCLWNPYVVSKPVGVLWGHSASVIAVQFFVERKQLFSFSKDKVLRLWDIQHQLSIQRIACSFPKSQDFRCLFHFDEAHGRLFISFNNQLALLAMKSEASKRVKSHEKAVTCVLYNSILKQVISSDTGSTVSFWMIDTGQKIKQFTGCHGNAEISTMALDANETRLLTGSTDGTVKIWDFNGYCHHTLNVGQDGAVDISQILILKKKILVTGWERAITVFRPQNFNQFFIQPEEWKGGIQHHDDILCAAFLPPQTLVTGSYDGEIVLWNNSTENAHHVLHPDYQRLLKSKLDTKPQKLLSAGRSQPSHPMADHSTTGVRNFEIDTEGKNAVMRLCFLKARKNTAVTGGANLVSCGGSGYVRFWDIYKKQLLAEFLAHSGVGSIIMSTDKMNRYLTTGDLDGWLKIWNIEEYCLNSSKNKITKAPTLIRSFQPHEDRISSLEMCEPGGQLLIISSSADCSICVTGVCNAPVWIFGQAKHWHIENCLFLPKRDTNLVESEIQKEISLFSKEESCLDPTEHSLLNKKNKDDSTYNVRPSEDINLDIKYKERSTCMKETQKPYYGEVIKKSFSTFRSLNIGALEELPEVNKPAFLLDPEKYFRKEPEEERPQILEAPSLFKTLKAVFDEKNLFPKEILHHERKAKQLCQEKSCEVKKNKK

SEQ ID NO: 38163 - protein, 674 aa, Homo sapiens
  REGION 1..674: note = ENSP00000419130
  VARIANT 1: note = Any amino acid
XPASACEDGEATMTINWAELLSGCHKCCHILEHKLHQGDWVRQVTYNASLDAIISSTTSNTNSVVMAWREKSKKRLNMTSFNIAQGIHAFDYHSRLNLIATAGINNKVCLWNPYVVSKPVGVLWGHSASVIAVQFFVERKQLFSFSKDKVLRLWDIQHQLSIQRIACSFPKSQDFRCLFHFDEAHGRLFISFNNQLALLAMKSEASKRVKSHEKAVTCVLYNSILKQVISSDTGSTVSFWMIDTGQKIKQFTGCHGNAEISTMALDANETRLLTGSTDGTVKIWDFNGYCHHTLNVGQDGAVDISQILILKKKILVTGWERYDYASWKTIGRAITVFRPQNFNQFFIQPEEWKGGIQHHDDILCAAFLPPQTLVTGSYDGEIVLWNNSTENAHHVLHPDYQRLLKSKLDTKPQKLLSAGRSQPSHPMADHSTTGVRNFEIDTEGKNAVMRLCFLKARKNTAVTGGANLVSCGGSGYVRFWDIYKKQLLAEFLAHSGVGSIIMSTDKMNRYLTTGDLDGWLKIWNIEEESCLDPTEHSLLNKKNKDDSTYNVRPSEDINLDIKYKERSTCMKETQKPYYGEVIKKSFSTFRSLNIGALEELPEVNKPAFLLDPEKYFRKEPEEERPQILEAPSLFKTLKAVFDEKNLFPKEILHHERKAKQLCQEKSCEVKKNKK

SEQ ID NO: 38164 - protein, 518 aa, Homo sapiens
  REGION 1..518: note = ENSP00000419749
MSCQKAVLELNIGSQLGPKSPERTEGVTAFEDYGTGLLENQLSVGDFVKIQKAFESPQPRKIICMSREDFTQKMTEIVGWGTKEEYGELFDKVDVAQDGFINWDKLTSFILLELYEQDERAKATVVPQWKDLEFLPVKHKDTIQKVIFLKNSSHYLTISKEGLLAIWGEHLKLQETFPITSDATKLKHLWVTSLVSLENVNKIAVAFTSKEVCFYDLLSKEEFACQYKLQGLKGTPICMDYWYDPLDANESILSFGDITGKVQAIAFTAALISLFERPASACEDGEATMTINWAELLSGCHKCCHILEHKLHQGDWVRQVTYNASLDAIISSTTSNTNSVVMAWREKSKKRLNMTSFNIAQGIHAFDYHSRLNLIATAGINNKVCLWNPYVVSKPVGVLWGHSASVIAVQFFVERKQLFSFSKDKVLRLWDIQHQLSIQRIACSFPKSQDFRCLFHFDEAHGRLFISFNNQLALLAMKSEASKRVKSHEKAVTCVLYNSILKQPSQCEDDTNEDPYDN

SEQ ID NO: 38165 - protein, 139 aa, Homo sapiens
  REGION 1..139: note = ENSP00000418539
  VARIANT 1: note = Any amino acid
XIDTEGKNAVMRLCFLKARKNTAVTGGANLVSCGGSGYVRFWDIYKKQLLAEFLAHSGVGSIIMSTDKMNRYLTTGDLDGWLKIWNIEAKHWHIENCLFLPKRDTNLVESEIQKEISLFSKEESCLDPTEHSLLNKKNK

SEQ ID NO: 38166 - protein, 61 aa, Homo sapiens
  REGION 1..61: note = ENSP00000417090
MSCQKAVLELNIGSQLGPKSPERTEGVTAFEDYGTGLLENQLSVGDFVKIQKAFELLTMHL

SEQ ID NO: 38167 - protein, 118 aa, Homo sapiens
  REGION 1..118: note = ENSP00000418718
MSCQKAVLELNIGSQLGPKSPERTEGVTAFEDYGTGLLENQLSVGDFVKIQKAFEVISSDTGSTVSFWMIDTGQKIKQFTGCHGNAEISTMALDANETRLLTGSTDGTVKIWDFNGYC

SEQ ID NO: 38168 - protein, 113 aa, Homo sapiens
  REGION 1..113: note = ENSP00000419917
MSCQKAVLELNIGSQLGPKSPERTEGVTAFEDYGTGLLENQLSVGDFVKIQKAFEIAVAFTSKEVCFYDLLSKEEFACQYKLQGLKGTPICMDYWYDPLDANESILSFGDITG

SEQ ID NO: 38169 - protein, 1149 aa, Homo sapiens
  REGION 1..1149: note = ENSP00000288912
MSDAAEAPREATGENGETEMKEEEEPNPNYKEVEDPQQESKDDTIAWRESQEEERKTGEEEGEEEGKEDKKIVMEETEEKAGEVQEKEASGIQEETTVEPQEVTASMIRLETQITDSQSITSGIFPKTQRGSKSKLSLQLEDAETDELLRDLSTQIEFLDLDQISPEEQQISSPERQPSGELEEKTDRMPQDELGQERRDLEPENREEGQERRVSDIQSKAGISRESLVSSTTEDILFQKDKSTPVYPLTMTWSFGWNSSLPVYYIREERQRVLLYVCAHTAIIYNVFRNNQYHLQGHANIISCLCVSEDRRWIATADKGPDCLVIIWDSFTGIPVHTIFDSCPEGNGIMAMAMTHDAKYLATISDAEVQKVCIWKWTLAVETPACTLELPTEYGVQNYVTFNPTNNKELVSNSKTRAIYYAWYEERDTLAHSAPLLTEKTFNKLVGKFSQSIFHLNLTQILSATMEGKLVVWDIHRPPSSASTFLGFPYIKPCKLVHLQKEGITVLTTIDSYIVTGDIKGNIKFYDHTLSIVNWYSHLKLGAIRTLSFSKTPATPPTEKSNYPPDCTLKGDLFVLRNFIIGTSDAAVYHLTTDGTKLEKLFVEPKDAICAISCHPYQPLIAIGSICGMIKVWNYENKQYLFSRVFEKGLGVQSLTYNPEGALLGAGFTEGTVYILDAMSLENESPEPFKYSRTSVTHISFSHDSQYMATADRSFTVAVYMLVVRNGQRVWEYLARLRSHRKSIRSLLFGVYLDSNEPRLLSLGTDRLLIEYDLLRSYKDHLEVLDIHHTDQGCYPTCMVWYPPLTRELFLLICNSGYKVKLFNATTKMCRKTLLGPAYGSPIEQTQVLPVRSMAELQKRYLVFINRDKVGLQILPVDGNPHKTSAIVCHPNGVAGMAVSYDGCYAFTAGGHDRSVVQWKITLSVLEAAVSLGGEDLTPFYGLLSGGREGKFYRELEDYFYYSQLRSQGIDTMETRKVSEHICLSELPFVMRAIGFYPSEEKIDDIFNEIKFGEYVDTGKLIDKINLPDFLKVYLNHKPPFGNTMSGIHKSFEVLGYTNSKGKKAIRREDFLRLLVTKGEHMTEEEMLDCFASLFGLNPEGWKSEPATCSVKGSEICLEEELPDEITAEIFATEILGLTISEDSGQDGQ

SEQ ID NO: 38170 - protein, 941 aa, Homo sapiens
  REGION 1..941: note = ENSP00000380595
MSDAAEAPREATGENGETEMKEEEEPNPNYKEVEDPQQESKDDTIAWRESQEEERKTGEEEGEEEGKEDKKIVMEETEEKAGEVQEKEASGIQEETTVEPQEVTASMIRLETQITDSQSITSGIFPKTQRGSKSKLSLQLEDAETDELLRDLSTQIEFLDLDQISPEEQQISSPERQPSGELEEKTDRMPQDELGQERRDLEPENREEGQERRVSDIQSKAGISRESLVSSTTEDILFQKDKSTPVYPLTMTWSFGWNSSLPVYYIREERQRVLLYVCAHTAIIYNVFRNNQYHLQGHANIISCLCVSEDRRWIATADKGPDCLVIIWDSFTGIPVHTIFDSCPEGNGIMAMAMTHDAKYLATISDAEVQKVCIWKWTLAVETPACTLELPTEYGVQNYVTFNPTNNKELVSNSKTRAIYYAWYEERDTLAHSAPLLTEKTFNKLVGKFSQSIFHLNLTQILSATMEGKLVVWDIHRPPSSASTFLGFPYIKPCKLVHLQKEGITVLTTIDSYIVTGDIKGNIKFYDHTLSIVNWYSHLKLGAIRTLSFSKTPATPPTEKSNYPPDCTLKGDLFVLRNFIIGTSDAAVYHLTTDGTKLEKLFVEPKDAICAISCHPYQPLIAIGSICGMIKVWNYENKQYLFSRVFEKGLGVQSLTYNPEGALLGAGFTEGTVYILDAMSLENESPEPFKYSRTSVTHISFSHDSQYMATADRSFTVAVYMLVVRNGQRVWEYLARLRSHRKSIRSLLFGVYLDSNEPRLLSLGTDRLLIEYDLLRSYKDHLEVLDIHHTDQGCYPTCMVWYPPLTRELFLLICNSGYKVKLFNATTKMCRKTLLGPAYGSPIEQTQVLPVRSMAELQKRYLVFINRDKVGLQILPVDGNPHKTSAIVCHPNGVAGMAVSYDGCYAFTAGGHDRSVVQWKITLSHPGSQAPILSPSDTSRS

SEQ ID NO: 38171 - protein, 220 aa, Homo sapiens
  REGION 1..220: note = ENSP00000219454
MPLTGVGPGSCRRQIIRALCLLLLLLHAGSAKNIWKRALPARLAEKSRAEEAGAPGGPRQPRADRCPPPPRTLPPGACQAARCQADSECPRHRRCCYNGCAYACLEAVPPPPVLDWLVQPKPRWLGGNGWLLDGPEEVLQAEACSTTEDGAEPLLCPSGYECHILSPGDVAEGIPNRGQCVKQRRQADGRILRHKLYKEYPEGDSKNVAEPGRGQQKHFQ

SEQ ID NO: 38172 - protein, 220 aa, Homo sapiens; identical to SEQ ID NO: 38171
  REGION 1..220: note = ENSP00000456920

SEQ ID NO: 38173 - protein, 66 aa, Homo sapiens
  REGION 1..66: note = ENSP00000481580
MPLTGVGPGSCRRQIIRALCLLLLLLHAGSAKNIWKRALPARLAEKSRVSAWDGEAGAACVGGSQP

SEQ ID NO: 38174 - protein, 890 aa, Homo sapiens
  REGION 1..890: note = ENSP00000423337
MDSNTAPLGPSCPQPPPAPQPQARSRLNATASLEQERSERPRAPGPQAGPGPGVRDAAAPAEPQAQHTRSRERADGTGPTKGDMEIPFEEVLERAKAGDPKAQTEVGKHYLQLAGDTDEELNSCTAVDWLVLAAKQGRREAVKLLRRCLADRRGITSENEREVRQLSSETDLERAVRKAALVMYWKLNPKKKKQVAVAELLENVGQVNEHDGGAQPGPVPKSLQKQRRMLERLVSSESKNYIALDDFVEITKKYAKGVIPSSLFLQDDEDDDELAGKSPEDLPLRLKVVKYPLHAIMEIKEYLIDMASRAGMHWLSTIIPTHHINALIFFFIVSNLTIDFFAFFIPLVIFYLSFISMVICTLKVFQDSKAWENFRTLTDLLLRFEPNLDVEQAEVNFGWNHLEPYAHFLLSVFFVIFSFPIASKDCIPCSELAVITGFFTVTSYLSLSTHAEPYTRRALATEVTAGLLSLLPSMPLNWPYLKVLGQTFITVPVGHLVVLNVSVPCLLYVYLLYLFFRMAQLRNFKGTYCYLVPYLVCFMWCELSVVILLESTGLGLLRASIGYFLFLFALPILVAGLALVGVLQFARWFTSLELTKIAVTVAVCSVPLLLRWWTKASFSVVGMVKSLTRSSMVKLILVWLTAIVLFCWFYVYRSEGMKVYNSTLTWQQYGALCGPRAWKETNMARTQILCSHLEGHRVTWTGRFKYVRVTDIDNSAESAINMLPFFIGDWMRCLYGEAYPACSPGNTSTAEEELCRLKLLAKHPCHIKKFDRYKFEITVGMPFSSGADGSRSREEDDVTKDIVLRASSEFKSVLLSLRQGSLIEFSTILEGRLGSKWPVFELKAISCLNCMAQLSPTRRHVKIEHDWRSTVHGAVKFAFDFFFFPFLSAA

SEQ ID NO: 38175 - protein, 890 aa, Homo sapiens; identical to SEQ ID NO: 38174
  REGION 1..890: note = ENSP00000226760

SEQ ID NO: 38176 - protein, 252 aa, Homo sapiens
  REGION 1..252: note = ENSP00000424103
  VARIANT 1: note = Any amino acid
XQGRREAVKLLRRCLADRRGITSENEREVRQLSSETDLERAVRKAALVMYWKLNPKKKKQVAVAELLENVGQVNEHDGGAQPGPVPKSLQKQRRMLERLVSSELWGAHAVFSHASAKNYIALDDFVEITKKYAKGVIPSSLFLQDDEDDDELAGKSPEDLPLRLKVVKYPLHAIMEIKEYLIDMASRAGMHWLSTIIPTHHINALIFFFIVSNLTIDFFAFFIPLVIFYLSFISMVICTLKVFQDSKAWENF

SEQ ID NO: 38177 - protein, 379 aa, Homo sapiens
  REGION 1..379: note = ENSP00000286574
MARRSAFPAAALWLWSILLCLLALRAEAGPPQEESLYLWIDAHQARVLIGFEEDILIVSEGKMAPFTHDFRKAQQRMPAIPVNIHSMNFTWQAAGQAEYFYEFLSLRSLDKGIMADPTVNVPLLGTVPHKASVVQVGFPCLGKQDGVAAFEVDVIVMNSEGNTILQTPQNAIFFKTCQQAECPGGCRNGGFCNERRICECPDGFHGPHCEKALCTPRCMNGGLCVTPGFCICPPGFYGVNCDKANCSTTCFNGGTCFYPGKCICPPGLEGEQCEISKCPQPCRNGGKCIGKSKCKCSKGYQGDLCSKPVCEPGCGAHGTCHEPNKCQCQEGWHGRHCNKRYEASLIHALRPAGAQLRQHTPSLKKAEERRDPPESNYIW

SEQ ID NO: 38178 - protein, 128 aa, Homo sapiens
  REGION 1..128: note = ENSP00000439024
GVNCDKANCSTTCFNGGTCFYPGKCICPPGLEGEQCEISKCPQPCRNGGKCIGKSKSVCEPGCGAHGTCHEPNKCQCQEGWHGRHCNKRYEASLIHALRPAGAQLRQHTPSLKKAEERRDPPESNYIW

SEQ ID NO: 38179 - protein, 133 aa, Homo sapiens
  REGION 1..133: note = ENSP00000442063
MAPFTHDFRKAQQRMPAIPVNIHSMNFTWQAAGQAEYFYEFLSLRSLDKGIMADPTVNVPLLGTVPHKASVVQVGFPCLGKQDGVAAFEVDVIVMNSEGNTILQTPQNAIFFKTCQQAECPGGCRNGGFCNER

SEQ ID NO: 38180 - protein, 82 aa, Homo sapiens
  REGION 1..82: note = ENSP00000465695
  VARIANT 1: note = Any amino acid
XEENKENDLRPSLPQSYAATVARPSASSASTVPGYSEDGGALRGEVIPEHEFATGPVCLDDENEFPPIILCRGNQKGKTKQS

SEQ ID NO: 38181 - protein, 446 aa, Homo sapiens
  REGION 1..446: note = ENSP00000262139
MEAEAADAPPGGVESALSCFSFNQDCTSLATGTKAGYKLFSLSSVEQLDQVHGSNEIPDVYIVERLFSSSLVVVVSHTKPRQMNVYHFKKGTEICNYSYSSNILSIRLNRQRLLVCLEESIYIHNIKDMKLLKTLLDIPANPTGLCALSINHSNSYLAYPGSLTSGEIVLYDGNSLKTVCTIAAHEGTLAAITFNASGSKLASASEKGTVIRVFSVPDGQKLYEFRRGMKRYVTISSLVFSMDSQFLCASSNTETVHIFKLEQVTNSRPEEPSTWSGYMGKMFMAATNYLPTQVSDMMHQDRAFATARLNFSGQRNICTLSTIQKLPRLLVASSSGHLYMYNLDPQDGGECVLIKTHSLLGSGTTEENKENDLRPSLPQSYAATVARPSASSASTVPGYSEDGGALRGEVIPEHEFATGPVCLDDENEFPPIILCRGNQKGKTKQS

SEQ ID NO: 38182 - protein, 369 aa, Homo sapiens
  REGION 1..369: note = ENSP00000465470
MEAEAADAPPGGVESALSCFSFNQDCTSLATGTKAGYKLFSLSSVEQLDQVHGSNEIPDVYIVERLFSSSLVVVVSHTKPRQMNVYHFKKGTEICNYSYSSNILSIRLNRQRLLVCLEESIYIHNIKDMKLLKTLLDIPANPTGLCALSINHSNSYLAYPGSLTSGEIVLYDGNSLKTVCTIAAHEGTLAAITFNASGSKLASASEKGTVIRVFSVPDGQKLYEFRRGMKRYVTISSLVFSMDSQFLCASSNTETVHIFKLEQVTNRQSTRRAFDLEWLHGKDVYGCYQLPPYPGVRHDASGQGFCHCTLELLRTEEHLYPLNDPEVATAASCVIQWTPLYVQFGSSGWRRVCLNQNPQLAWLRNNRRE

SEQ ID NO: 38183 - protein, 54 aa, Homo sapiens
  REGION 1..54: note = ENSP00000465557
  VARIANT 1: note = Any amino acid
XVARPSASSASTVPGYSEDGGALRGEVIPEHEFATGPVCLDDENEFPPVSIRNP

SEQ ID NO: 38184 - protein, 364 aa, Homo sapiens
  REGION 1..364: note = ENSP00000437345
MNVYHFKKGTEICNYSYSSNILSIRLNRQRLLVCLEESIYIHNIKDMKLLKTLLDIPANPTGLCALSINHSNSYLAYPGSLTSGEIVLYDGNSLKTVCTIAAHEGTLAAITFNASGSKLASASEKGTVIRVFSVPDGQKLYEFRRGMKRYVTISSLVFSMDSQFLCASSNTETVHIFKLEQVTNSRPEEPSTWSGYMGKMFMAATNYLPTQVSDMMHQDRAFATARLNFSGQRNICTLSTIQKLPRLLVASSSGHLYMYNLDPQDGGECVLIKTHSLLGSGTTEENKENDLRPSLPQSYAATVARPSASSASTVPGYSEDGGALRGEVIPEHEFATGPVCLDDENEFPPIILCRGNQKGKTKQS

SEQ ID NO: 38185 - protein, 205 aa, Homo sapiens
  REGION 1..205: note = ENSP00000466270
VTISSLVFSMDSQFLCASSNTETVHIFKLEQVTNSRPEEPSTWSGYMGKMFMAATNYLPTQVSDMMHQDRAFATARLNFSGQRNICTLSTIQKLPRLLVASSSGHLYMYNLDPQDGGECVLIKTHSLLGSGTTEENKENDLRPSLPQSYAATVARPSASSASTVPGYSEDGGALRGEVIPEHEFATGPVCLDDENEFPPVSIRNP

SEQ ID NO: 38186 - protein, 543 aa, Homo sapiens
  REGION 1..543: note = ENSP00000346829
MAGAIIENMSTKKLCIVGGILLVFQIIAFLVGGLIGPTTAVSYMSVKCVDARKNHHKTKWFVPWGPNHCDKIRDIEEAIPREIEANDIVFSVHIPLPHMEMSPWFQFMLFILQLDIAFKLNNQIRENAEVSMDVSLAYRDDAFAEWTEMAHERVPRKLKCTFTSPKTPEHEGRYYECDVLPFMEIGSVAHKFYLLNIRLPVNEKKKINVGIGEIKDIRLVGIHQNGGFTKVWFAMKTFLTPSIFIIMVWYWRRITMMSRPPVLLEKVIFALGISMTFINIPVEWFSIGFDWTWMLLFGDIRQGIFYAMLLSFWIIFCGEHMMDQHERNHIAGYWKQVGPIAVGSFCLFIFDMCERGVQLTNPFYSIWTTDIGTELAMAFIIVAGICLCLYFLFLCFMVFQVFRNISGKQSSLPAMSKVRRLHYEGLIFRFKFLMLITLACAAMTVIFFIVSQVTEGHWKWGGVTVQVNSAFFTGIYGMWNLYVFALMFLYAPSHKNYGEDQSNGMQLPCKSREDCALFVSELYQELFSASKYSFINDNAASGI

SEQ ID NO: 38187 - protein, 541 aa, Homo sapiens
  REGION 1..541: note = ENSP00000262348
MAGAIIENMSTKKLCIVGGILLVFQIIAFLVGGLIAPGPTTAVSYMSVKCVDARKNHHKTKWFVPWGPNHCDKIRDIEEAIPREIEANDIVFSVHIPLPHMEMSPWFQFMLFILQLDIAFKLNNQIRENAEVSMDVSLAYRDDAFAEWTEMAHERVPRKLKCTFTSPKTPEHEGRYYECDVLPFMEIGSVAHKFYLLNIRLPVNEKKKINVGIGEIKDIRLVGIHQNGGFTKVWFAMKTFLTPSIFIIMVWYWRRITMMSRPPVLLEKVIFALGISMTFINIPVEWFSIGFDWTWMLLFGDIRQGIFYAMLLSFWIIFCGEHMMDQHERNHIAGYWKQVGPIAVGSFCLFIFDMCERGVQLTNPFYSIWTTDIGTELAMAFIIVAGICLCLYFLFLCFMVFQVFRNISGKQSSLPAMSKVRRLHYEGLIFRFKFLMLITLACAAMTVIFFIVSQVTEGHWKWGGVTVQVNSAFFTGIYGMWNLYVFALMFLYAPSHKNYGEDQSNGDLGVHSGEELQLTTTITHVDGPTEIYKLTRKEAQE

SEQ ID NO: 38188 - protein, 450 aa, Homo sapiens
  REGION 1..450: note = ENSP00000360015
MAGAIIENMSTKKLCIVGGILLVFQIIAFLVGGLIGENAEVSMDVSLAYRDDAFAEWTEMAHERVPRKLKCTFTSPKTPEHEGRYYECDVLPFMEIGSVAHKFYLLNIRLPVNEKKKINVGIGEIKDIRLVGIHQNGGFTKVWFAMKTFLTPSIFIIMVWYWRRITMMSRPPVLLEKVIFALGISMTFINIPVEWFSIGFDWTWMLLFGDIRQGIFYAMLLSFWIIFCGEHMMDQHERNHIAGYWKQVGPIAVGSFCLFIFDMCERGVQLTNPFYSIWTTDIGTELAMAFIIVAGICLCLYFLFLCFMVFQVFRNISGKQSSLPAMSKVRRLHYEGLIFRFKFLMLITLACAAMTVIFFIVSQVTEGHWKWGGVTVQVNSAFFTGIYGMWNLYVFALMFLYAPSHKNYGEDQSNGDLGVHSGEELQLTTTITHVDGPTEIYKLTRKEAQE

SEQ ID NO: 38189 - protein, 200 aa, Homo sapiens
  REGION 1..200: note = ENSP00000431552
  VARIANT 1: note = Any amino acid
XNMSTKKLCIVGGILLVFQIIAFLVGGLIGENAEVSMDVSLAYRDDAFAEWTEMAHERVPRKLKCTFTSPKTPEHEGRYYECDVLPFMEIGSVAHKFYLLNIRLPVNEKKKINVGIGEIKDIRLVGIHQNGGFTKVWFAMKTFLTPSIFIIMVWYWRRITMMSRPPVLLEKVIFALGISMTFINIPVEWFSIGFDWTWML

SEQ ID NO: 38190 - protein, 134 aa, Homo sapiens
  REGION 1..134: note = ENSP00000433690
MDVSLAYRDDAFAEWTEMAHERVPRKLKCTFTSPKTPEHEGRYYECDVLPFMEIGSVAHKFYLLNIRLPVNEKKKINVGIGEIKDIRLVGIHQNGGFTKVWFAMKTFLTPSIFIIMVWYWRRITMMSRPPVLLE

SEQ ID NO: 38191 - protein, 222 aa, Homo sapiens
  REGION 1..222: note = ENSP00000433111
MSVKCVDARKNHHKTKWFVPWGPNHCDKIRDIEEAIPREIEANDIVFSVHIPLPHMEMSPWFQFMLFILQLDIAFKLNNQIRENAEVSMDVSLAYRDDAFAEWTEMAHERVPRKLKCTFTSPKTPEHEGRYYECDVLPFMEIGSVAHKFYLLNIRLPVNEKKKINVGIGEIKDIRLVGIHQNGGFTKVWFAMKTFLTPSIFIIMVWYWRRITMMSRPPVLLE

SEQ ID NO: 38192 - protein, 122 aa, Homo sapiens
  REGION 1..122: note = ENSP00000360012
MDVSLAYRDDAFAEWTEMAHERVPRKLKCTFTSPKTPEHEGRYYECDVLPFMEIGSVAHKFYLLNIRLPVNEKKKINVGIGEIKDIRLVGIHQNGGFTKVWFAMKTFLTPSIFIIMVWYWRR

SEQ ID NO: 38193 - protein, 152 aa, Homo sapiens
  REGION 1..152: note = ENSP00000436196
MSVKCVDARKNHHKTKWFVPWGPNHCDKIRDIEEAIPREIEANDIVFSVHIPLPHMEMSPWFQFMLFILQLDIAFKLNNQIRENAEVSMDVSLAYRDDAFAEWTEMAHERVPRKLKCTFTSPKTPEHEGRYYECDVLPFMEIGSVAHKFYLL

SEQ ID NO: 38194 - protein, 38 aa, Homo sapiens
  REGION 1..38: note = ENSP00000433188
MAGAIIENMSTKKLCIVGGILLVFQIIAFLVGGLIAYP

SEQ ID NO: 38195 - protein, 152 aa, Homo sapiens
  REGION 1..152: note = ENSP00000433867
  VARIANT 1: note = Any amino acid
XFPSNQLREGNVIDFIRNNRRVGELCPAQTRSSVTRLRYLHAPGPTTAVSYMSVKCVDARKNHHKTKWFVPWGPNHCDKIRDIEEAIPREIEANDIVFSVHIPLPHMEMSPWFQFMLFILQLDIAFKLNNQITMNRTSEKSLGVWQTRSYYT

SEQ ID NO: 38196 - protein, 127 aa, Homo sapiens
  REGION 1..127: note = ENSP00000360010
MAGAIIENMSTKKLCIVGGILLVFQIIAFLVGGLIAPGPTTAVSYMSVKCVDARKNHHKTKWFVPWGPNHCDKIRDIEEAIPREIEANDIVFSVHIPLPHMEMSPWFQFMLFILQLDIAFKLNNQIS

SEQ ID NO: 38197 - protein, 365 aa, Homo sapiens
  REGION 1..365: note = ENSP00000233948
MLPPLPSRLGLLLLLLLCPAHVGGLWWAVGSPLVMDPTSICRKARRLAGRQAELCQAEPEVVAELARGARLGVRECQFQFRFRRWNCSSHSKAFGRILQQDIRETAFVFAITAAGASHAVTQACSMGELLQCGCQAPRGRAPPRPSGLPGTPGPPGPAGSPEGSAAWEWGGCGDDVDFGDEKSRLFMDARHKRGRGDIRALVQLHNNEAGRLAVRSHTRTECKCHGLSGSCALRTCWQKLPPFREVGARLLERFHGASRVMGTNDGKALLPAVRTLKPPGRADLLYAADSPDFCAPNRRTGSPGTRGRACNSSAPDLSGCDLLCCGRGHRQESVQLEENCLCRFHWCCVVQCHRCRVRKELSLCL

SEQ ID NO: 38198 - protein, 349 aa, Homo sapiens
  REGION 1..349: note = ENSP00000285018
MNRKARRCLGHLFLSLGMVYLRIGGFSSVVALGASIICNKIPGLAPRQRAICQSRPDAIIVIGEGSQMGLDECQFQFRNGRWNCSALGERTVFGKELKVGSREAAFTYAIIAAGVAHAITAACTQGNLSDCGCDKEKQGQYHRDEGWKWGGCSADIRYGIGFAKVFVDAREIKQNARTLMNLHNNEAGRKILEENMKLECKCHGVSGSCTTKTCWTTLPQFRELGYVLKDKYNEAVHVEPVRASRNKRPTFLKIKKPLSYRKPMDTDLVYIEKSPNYCEEDPVTGSVGTQGRACNKTAPQASGCDLMCCGRGYNTHQYARVWQCNCKFHWCCYVKCNTCSERTEMYTCK

SEQ ID NO: 38199 - protein, 349 aa, Homo sapiens
  REGION 1..349: note = ENSP00000341032
MHRNFRKWIFYVFLCFGVLYVKLGALSSVVALGANIICNKIPGLAPRQRAICQSRPDAIIVIGEGAQMGINECQYQFRFGRWNCSALGEKTVFGQELRVGSREAAFTYAITAAGVAHAVTAACSQGNLSNCGCDREKQGYYNQAEGWKWGGCSADVRYGIDFSRRFVDAREIKKNARRLMNLHNNEAGRKVLEDRMQLECKCHGVSGSCTTKTCWTTLPKFREVGHLLKEKYNAAVQVEVVRASRLRQPTFLRIKQLRSYQKPMETDLVYIEKSPNYCEEDAATGSVGTQGRLCNRTSPGADGCDTMCCGRGYNTHQYTKVWQCNCKFHWCCFVKCNTCSERTEVFTCK

SEQ ID NO: 38200 - protein, 353 aa, Homo sapiens
  REGION 1..353: note = ENSP00000386546
MLLLSPRSALVSVYCPQIFLLLSSGSYLALSSVVALGANIICNKIPGLAPRQRAICQSRPDAIIVIGEGAQMGINECQYQFRFGRWNCSALGEKTVFGQELRVGSREAAFTYAITAAGVAHAVTAACSQGNLSNCGCDREKQGYYNQAEGWKWGGCSADVRYGIDFSRRFVDAREIKKNARRLMNLHNNEAGRKVLEDRMQLECKCHGVSGSCTTKTCWTTLPKFREVGHLLKEKYNAAVQVEVVRASRLRQPTFLRIKQLRSYQKPMETDLVYIEKSPNYCEEDAATGSVGTQGRLCNRTSPGADGCDTMCCGRGYNTHQYTKVWQCNCKFHWCCFVKCNTCSERTEVFTCK

SEQ ID NO: 38201 - protein, 333 aa, Homo sapiens
  REGION 1..333: note = ENSP00000386781
MSAPPFYRALSSVVALGANIICNKIPGLAPRQRAICQSRPDAIIVIGEGAQMGINECQYQFRFGRWNCSALGEKTVFGQELRVGSREAAFTYAITAAGVAHAVTAACSQGNLSNCGCDREKQGYYNQAEGWKWGGCSADVRYGIDFSRRFVDAREIKKNARRLMNLHNNEAGRKVLEDRMQLECKCHGVSGSCTTKTCWTTLPKFREVGHLLKEKYNAAVQVEVVRASRLRQPTFLRIKQLRSYQKPMETDLVYIEKSPNYCEEDAATGSVGTQGRLCNRTSPGADGCDTMCCGRGYNTHQYTKVWQCNCKFHWCCFVKCNTCSERTEVFTCK

SEQ ID NO: 38202 - protein, 205 aa, Homo sapiens
  REGION 1..205: note = ENSP00000387217
MHRNFRKWIFYVFLCFGVLYVKLGALSSVVALGANIICNKIPGLAPRQRAICQSRPDAIIVIGEGAQMGINECQYQFRFGRWNCSALGEKTVFGQELRVGSREAAFTYAITAAGVAHAVTAACSQGNLSNCGCDREKQGYYNQAEGWKWGGCSADVRYGIDFSRRFVDAREIKKNARRLMNLHNNEAGRKGLLGQPRVTSSPLFP

SEQ ID NO: 38203 - protein, 57 aa, Homo sapiens
  REGION 1..57: note = ENSP00000392750
MGINECQYQFRFGRWNCSALGEKTVFGQELRVGSREAAFTYAITAAGVAHAVTAACS

SEQ ID NO: 38204 - protein, 44 aa, Homo sapiens
  REGION 1..44: note = ENSP00000461865
MAKPFFRLQKFLRRTQFLLFFLTAAYLMTGSLLLLQRVRVALPQ

SEQ ID NO: 38205 - protein, 575 aa, Homo sapiens
  REGION 1..575: note = ENSP00000460825
MAKPFFRLQKFLRRTQFLLFFLTAAYLMTGSLLLLQRVRVALPQGPRAPGPLQTLPVAAVALGVGLLDSRALHDPRVSPELLLGVDMLQSPLTRPRPGPRWLRSRNSELRQLRRRWFHHFMSDSQGPPALGPEAARPAIHSRGTYIGCFSDDGHERTLKGAVFYDLRKMTVSHCQDACAERSYVYAGLEAGAECYCGNRLPAVSVGLEECNHECKGEKGSVCGAVDRLSVYRVDELQPGSRKRRTATYRGCFRLPENITHAFPSSLIQANVTVGTCSGFCSQKEFPLAILRGWECYCAYPTPRFNLRDAMDSSVCGQDPEAQRLAEYCEVYQTPVQDTRCTDRRFLPNKSKVFVALSSFPGAGNTWARHLIEHATGFYTGSYYFDGTLYNKGFKGEKDHWRSRRTICVKTHESGRREIEMFDSAILLIRNPYRSLVAEFNRKCAGHLGYAADRNWKSKEWPDFVNSYASWWSSHVLDWLKYGKRLLVVHYEELRRSLVPTLREMVAFLNVSVSEERLLCVENNKEGSFRRRGRRSHDPEPFTPEMKDLINGYIRTVDQALRDHNWTGLPREYVPR

SEQ ID NO: 38206 - protein, 459 aa, Homo sapiens
  REGION 1..459: note = ENSP00000460396
MAEQGRCCDLAALGEQGGAPPWEKSLGTYIGCFSDDGHERTLKGAVFYDLRKMTVSHCQDACAERSYVYAGLEAGAECYCGNRLPAVSVGLEECNHECKGEKGSVCGAVDRLSVYRVDELQPGSRKRRTATYRGCFRLPENITHAFPSSLIQANVTVGTCSGFCSQKEFPLAILRGWECYCAYPTPRFNLRDAMDSSVCGQDPEAQRLAEYCEVYQTPVQDTRCTDRRFLPNKSKVFVALSSFPGAGNTWARHLIEHATGFYTGSYYFDGTLYNKGFKGEKDHWRSRRTICVKTHESGRREIEMFDSAILLIRNPYRSLVAEFNRKCAGHLGYAADRNWKSKEWPDFVNSYASWWSSHVLDWLKYGKRLLVVHYEELRRSLVPTLREMVAFLNVSVSEERLLCVENNKEGSFRRRGRRSHDPEPFTPEMKDLINGYIRTVDQALRDHNWTGLPREYVPR

SEQ ID NO: 38207 - protein, 180 aa, Homo sapiens
  REGION 1..180: note = ENSP00000460041
MAKPFFRLQKFLRRTQFLLFFLTAAYLMTGSLLLLQRVRVALPQGPRAPGPLQTLPVAAVALGVGLLDSRALHDPRVSPELLLGVDMLQSPLTRPRPGPRWLRSRNSELRQLRRRWFHHFMSDSQGPPALGPEAARPAIHSRGTYIGCFSDDGHERTLKGAVFYDLRKMTVSHCQDACAE

SEQ ID NO: 38208 - protein, 575 aa, Homo sapiens; identical to SEQ ID NO: 38205
  REGION 1..575: note = ENSP00000458374

SEQ ID NO: 38209 - protein, 87 aa, Homo sapiens
  REGION 1..87: note = ENSP00000458527
MAKPFFRLQKFLRRTQFLLFFLTAAYLMTGSLLLLQRVRVALPQGPRAPGPLQTLPVAAVALGVGLLDSRALHDPRVSPELLLGVDM

SEQ ID NO: 38210 - protein, 45 aa, Homo sapiens
  REGION 1..45: note = ENSP00000461642
MAKPFFRLQKFLRRTQFLLFFLTAAYLMTGSLLLLQRVRVALPQG

SEQ ID NO: 38211 - protein, 136 aa, Homo sapiens
  REGION 1..136: note = ENSP00000458339
  VARIANT 1: note = Any amino acid
XGSLLLLQRVRVALPQGPRAPGPLQTLPVAAVALGVGLLDSRALHDPRVSPELLLGVDMLQSPLTRPRPGPRWLRSRNSELRQLRRRWFHHFMSDSQGPPALGPEAARPAIHSRGPMSTPAWRPGRSVTAGTGCQR

SEQ ID NO: 38212 - protein, 26 aa, Homo sapiens
  REGION 1..26: note = ENSP00000460428
MTVSHCQDACAERSYVYAGLEAGAEC

SEQ ID NO: 38213 - protein, 575 aa, Homo sapiens; identical to SEQ ID NO: 38205
  REGION 1..575: note = ENSP00000323087

SEQ ID NO: 38214 - protein, 575 aa, Homo sapiens; identical to SEQ ID NO: 38205
  REGION 1..575: note = ENSP00000446032

SEQ ID NO: 38215 - protein, 565 aa, Homo sapiens
  REGION 1..565: note = ENSP00000448047
MAKLWFKFQRYFRRKPVRFFTFLALYLTAGSLVFLHSGFVGQPAVSGNQANPAAAGGPAEGAELSFLGDMHLGRGFRDTGEASSIARRYGPWFKGKDGNERAKLGDYGGAWSRALKGRVVREKEEERAKYIGCYLDDTQSRALRGVSFFDYKKMTIFRCQDNCAERGYLYGGLEFGAECYCGHKIQATNVSEAECDMECKGERGSVCGGANRLSVYRLQLAQESARRYGSAVFRGCFRRPDNLSLALPVTAAMLNMSVDKCVDFCTEKEYPLAALAGTACHCGFPTTRFPLHDREDEQLCAQKCSAEEFESCGTPSYFIVYQTQVQDNRCMDRRFLPGKSKQLIALASFPGAGNTWARHLIELATGFYTGSYYFDGSLYNKGFKGERDHWRSGRTICIKTHESGQKEIEAFDAAILLIRNPYKALMAEFNRKYGGHIGFAAHAHWKGKEWPEFVRNYAPWWATHTLDWLKFGKKVLVVHFEDLKQDLFVQLGRMVSLLGVAVREDRLLCVESQKDGNFKRSGLRKLEYDPYTADMQKTISAYIKMVDAALKGRNLTGVPDDYYPR

SEQ ID NO: 38216 - protein, 123 aa, Homo sapiens
  REGION 1..123: note = ENSP00000446744
MTIFRCQDNCAERGYLYGGLEFGAECYCGHKIQATNVSEAECDMECKGERGSVCGGANRLSVYRLQLAQESARRYGSAVFRGCFRRPDNLSLALPVTAAMLNMSVDKCVDFCTEKEYPLAALA

SEQ ID NO: 38217 - protein, 565 aa, Homo sapiens; identical to SEQ ID NO: 38215
  REGION 1..565: note = ENSP00000331933

SEQ ID NO: 38218 - protein, 585 aa, Homo sapiens
  REGION 1..585: note = ENSP00000447272
MAKLWFKFQRYFRRKPVRFFTFLALYLTAGSLVFLHSGFVGQPAVSGNQANPAAAGGPAEGAELSFLGDMHLGRGFRDTGEASSIARRYGPWFKGKDGNERAKLGDYGGAWSRALKGRVVREKEEERAKYIGCYLDDTQSRALRGVSFFDYKKMTIFRCQDNCAERGYLYGGLEFGAECYCGHKIQATNVSEAECDMECKGERGSVCGGANRLSVYRLQLAQESARRYGSAVFRGCFRRPDNLSLALPVTAAMLNMSVDKCVDFCTEKEYPLAALAGTACHCGFPTTRFPLHDREDEQLCAQKCSAEEFESCGTPSYFIVYQTQVQDNRCMDRRFLPGKSKQLIALASFPGAGNTWARHLIELATGFYTGSYYFDGSLYNKGFKGERDHWRSGRTICIKTHESGQKEIEAFDAAILLIRNPYKALMAEFNRKYGGHIGFAAHAHWKGKGAVPGSLQILFRSICTASVGEWPEFVRNYAPWWATHTLDWLKFGKKVLVVHFEDLKQDLFVQLGRMVSLLGVAVREDRLLCVESQKDGNFKRSGLRKLEYDPYTADMQKTISAYIKMVDAALKGRNLTGVPDDYYPR

SEQ ID NO: 38219 - protein, 1113 aa, Homo sapiens
  REGION 1..1113: note = ENSP00000265293
MPRPELPLPEGWEEARDFDGKVYYIDHTNRTTSWIDPRDRYTKPLTFADCISDELPLGWEEAYDPQVGDYFIDHNTKTTQIEDPRVQWRREQEHMLKDYLVVAQEALSAQKEIYQVKQQRLELAQQEYQQLHAVWEHKLGSQVSLVSGSSSSSKYDPEILKAEIATAKSRVNKLKREMVHLQHELQFKERGFQTLKKIDKKMSDAQGSYKLDEAQAVLRETKAIKKAITCGEKEKQDLIKSLAMLKDGFRTDRGSHSDLWSSSSSLESSSFPLPKQYLDVSSQTDISGSFGINSNNQLAEKVRLRLRYEEAKRRIANLKIQLAKLDSEAWPGVLDSERDRLILINEKEELLKEMRFISPRKWTQGEVEQLEMARKRLEKDLQAARDTQSKALTERLKLNSKRNQLVRELEEATRQVATLHSQLKSLSSSMQSLSSGSSPGSLTSSRGSLVASSLDSSTSASFTDLYYDPFEQLDSELQSKVEFLLLEGATGFRPSGCITTIHEDEVAKTQKAEGGGRLQALRSLSGTPKSMTSLSPRSSLSSPSPPCSPLMADPLLAGDAFLNSLEFEDPELSATLCELSLGNSAQERYRLEEPGTEGKQLGQAVNTAQGCGLKVACVSAAVSDESVAGDSGVYEASVQRLGASEAAAFDSDESEAVGATRIQIALKYDEKNKQFAILIIQLSNLSALLQQQDQKVNIRVAVLPCSESTTCLFRTRPLDASDTLVFNEVFWVSMSYPALHQKTLRVDVCTTDRSHLEECLGGAQISLAEVCRSGERSTRWYNLLSYKYLKKQSRELKPVGVMAPASGPASTDAVSALLEQTAVELEKRQEGRSSTQTLEDSWRYEETSENEAVAEEEEEEVEEEEGEEDVFTEKASPDMDGYPALKVDKETNTETPAPSPTVVRPKDRRVGTPSQGPFLRGSTIIRSKTFSPGPQSQYVCRLNRSDSDSSTLSKKPPFVRNSLERRSVRMKRPSSVKSLRSERLIRTSLDLELDLQATRTWHSQLTQEISVLKELKEQLEQAKSHGEKELPQWLREDERFRLLLRMLEKRQMDRAEHKGELQTDKMMRAAAKDVHRLRGQSCKEPPEVQSFREKMAFFTRPRMNIPALSADDV

SEQ ID NO: 38220 - protein, 1119 aa, Homo sapiens
  REGION 1..1119: note = ENSP00000427772
MPRPELPLPEGWEEARDFDGKVYYIDHTNRTTSWIDPRDRYTKPLTFADCISDELPLGWEEAYDPQVGDYFIDHNTKTTQIEDPRVQWRREQEHMLKDYLVVAQEALSAQKEIYQVKQQRLELAQQEYQQLHAVWEHKLGSQVSLVSGSSSSSKYDPEILKAEIATAKSRVNKLKREMVHLQHELQFKERGFQTLKKIDKKMSDAQGSYKLDEAQAVLRETKAIKKAITCGEKEKQDLIKSLAMLKDGFRTDRGSHSDLWSSSSSLESSSFPLPKQYLDVSSQTDISGSFGINSNNQLAEKVRLRLRYEEAKRRIANLKIQLAKLDSEAWPGVLDSERDRLILINEKEELLKEMRFISPRKWTQGEVEQLEMARKRLEKDLQAARDTQSKALTERLKLNSKRNQLVRELEEATRQVATLHSQLKSLSSSMQSLSSGSSPGSLTSSRGSLVASSLDSSTSASFTDLYYDPFEQLDSELQSKVEFLLLEGATGFRPSGCITTIHEDEVAKTQKAEGGGRLQALRSLSGTPKSMTSLSPRSSLSSPSPPCSPLMADPLLAGDAFLNSLEFEDPELSATLCELSLGNSAQERYRLEEPGTEGKQLGQAVNTAQGCGLKVACVSAAVSDESVAGDSGVYEASVQRLGASEAAAFDSDESEAVGATRIQIALKYDEKNKQFAILIIQLSNLSALLQQQDQKVNIRVAVLPCSESTTCLFRTRPLDASDTLVFNEVFWVSMSYPALHQKTLRVDVCTTDRSHLEECLGGAQISLAEVCRSGERSTRWYNLLSYKYLKKQSRELKPVGVMAPASGPASTDAVSALLEQTAVELEKRQEGRSSTQTLEDSWRYEETSENEAVAEEEEEEVEEEEGEEDVFTEKASPDMDGYPALKVDKETNTETPAPSPTVVRPKDRRVGTPSQGPFLRGSTIIRSKTFSPGPQSQYVCRLNRSDSDSSTLSKKPPFVRNSLERRSVRMKRPSPPPQPSSVKSLRSERLIRTSLDLELDLQATRTWHSQLTQEISVLKELKEQLEQAKSHGEKELPQWLREDERFRLLLRMLEKRQMDRAEHKGELQTDKMMRAAAKDVHRLRGQSCKEPPEVQSFREKMAFFTRPRMNIPALSADDV

SEQ ID NO: 38221 - protein, 1080 aa, Homo sapiens
  REGION 1..1080: note = ENSP00000377473
  VARIANT 1: note = Any amino acid
XRYTKPLTFADCISDELPLGWEEAYDPQVGDYFIDHNTKTTQIEDPRVQWRREQEHMLKDYLVVAQEALSAQKEIYQVKQQRLELAQQEYQQLHAVWEHKLGSQVSLVSGSSSSSKYDPEILKAEIATAKSRVNKLKREMVHLQHELQFKERGFQTLKKIDKKMSDAQGSYKLDEAQAVLRETKAIKKAITCGEKEKQDLIKSLAMLKDGFRTDRGSHSDLWSSSSSLESSSFPLPKQYLDVSSQTDISGSFGINSNNQLAEKVRLRLRYEEAKRRIANLKIQLAKLDSEAWPGVLDSERDRLILINEKEELLKEMRFISPRKWTQGEVEQLEMARKRLEKDLQAARDTQSKALTERLKLNSKRNQLVRELEEATRQVATLHSQLKSLSSSMQSLSSGSSPGSLTSSRGSLVASSLDSSTSASFTDLYYDPFEQLDSELQSKVEFLLLEGATGFRPSGCITTIHEDEVAKTQKAEGGGRLQALRSLSGTPKSMTSLSPRSSLSSPSPPCSPLMADPLLAGDAFLNSLEFEDPELSATLCELSLGNSAQERYRLEEPGTEGKQLGQAVNTAQGCGLKVACVSAAVSDESVAGDSGVYEASVQRLGASEAAAFDSDESEAVGATRIQIALKYDEKNKQFAILIIQLSNLSALLQQQDQKVNIRVAVLPCSESTTCLFRTRPLDASDTLVFNEVFWVSMSYPALHQKTLRVDVCTTDRSHLEECLGGAQISLAEVCRSGERSTRWYNLLSYKYLKKQSRELKPVGVMAPASGPASTDAVSALLEQTAVELEKRQEGRSSTQTLEDSWRYEETSENEAVAEEEEEEVEEEEGEEDVFTEKASPDMDGYPALKVDKETNTETPAPSPTVVRPKDRRVGTPSQGPFLRGSTIIRSKTFSPGPQSQYVCRLNRSDSDSSTLSKKPPFVRNSLERRSVRMKRPSPPPQPSSVKSLRSERLIRTSLDLELDLQATRTWHSQLTQEISVLKELKEQLEQAKSHGEKELPQWLREDERFRLLLRMLEKRMDRAEHKGELQTDKMMRAAAKDVHRLRGQSCKEPPEVQSFREKMAFFTRPRMNIPALSADDV

SEQ ID NO: 38222 - protein, 889 aa, Homo sapiens
  REGION 1..889: note = ENSP00000429339
  VARIANT 1: note = Any amino acid
XKKAITCGEKEKQDLIKSLAMLKDGFRTDRGSHSDLWSSSSSLESSSFPLPKQYLDVSSQTDISGSFGINSNNQLAEKVRLRLRYEEAKRRIANLKIQLAKLDSEAWPGVLDSERDRLILINEKEELLKEMRFISPRKWTQGEVEQLEMARKRLEKDLQAARDTQSKALTERLKLNSKRNQLVRELEEATRQVATLHSQLKSLSSSMQSLSSGSSPGSLTSSRGSLVASSLDSSTSASFTDLYYDPFEQLDSELQSKVEFLLLEGATGFRPSGCITTIHEDEVAKTQKAEGGGRLQALRSLSGTPKSMTSLSPRSSLSSPSPPCSPLMADPLLAGDAFLNSLEFEDPELSATLCELSLGNSAQERYRLEEPGTEGKQLGQAVNTAQGCGLKVACVSAAVSDESVAGDSGVYEASVQRLGASEAAAFDSDESEAVGATRIQIALKYDEKNKQFAILIIQLSNLSALLQQQDQKVNIRVAVLPCSESTTCLFRTRPLDASDTLVFNEVFWVSMSYPALHQKTLRVDVCTTDRSHLEECLGGAQISLAEVCRSGERSTRWYNLLSYKYLKKQSRELKPVGVMAPASGPASTDAVSALLEQTAVELEKRQEGRSSTQTLEDSWRYEETSENEAVAEEEEEEVEEEEGEEDVFTEKASPDMDGYPALKVDKETNTETPAPSPTVVRPKDRRVGTPSQGPFLRGSTIIRSKTFSPGPQSQYVCRLNRSDSDSSTLSKKPPFVRNSLERRSVRMKRPSSVKSLRSERLIRTSLDLELDLQATRTWHSQLTQEISVLKELKEQLEQAKSHGEKELPQWLREDERFRLLLRMLEKRMDRAEHKGELQTDKMMRAAAKDVHRLRGQSCKEPPEVQSFREKMAFFTRPRMNIPALSADDV

SEQ ID NO: 38223 - protein, 444 aa, Homo sapiens
  REGION 1..444: note = ENSP00000428084
FAILIIQLSNLSALLQQQDQKVNIRVAVLPCSESTTCLFRTRPLDASDTLVFNEVFWVSMSYPALHQKTLRVDVCTTDRSHLEECLGGAQISLAEVCRSGERSTRWYNLLSYKYLKKQSRELKPVGVMAPASGPASTDAVSALLEQTAVELEKRQEGRSSTQTLEDSWRYEETSENEAVAEEEEEEVEEEEGEEDVFTEKASPDMDGYPALKVDKETNTETPAPSPTVVRPKDRRVGTPSQGPFLRGSTIIRSKTFSPGPQSQYVCRLNRSDSDSSTLSKKPPFVRNSLERRSVRMKRPSPPPQPSSVKSLRSERLIRTSLDLELDLQATRTWHSQLTQEISVLKELKEQLEQAKSHGEKELPQWLREDERFRLLLRMLEKRMDRAEHKGELQTDKMMRAAAKDVHRLRGQSCKEPPEVQSFREKMAFFTRPRMNIPALSADDV

SEQ ID NO: 38224 - protein, 1192 aa, Homo sapiens
  REGION 1..1192: note = ENSP00000384222
MPRRAGSGQLPLPRGWEEARDYDGKVFYIDHNTRRTSWIDPRDRLTKPLSFADCVGDELPWGWEAGFDPQIGVYYIDHINKTTQIEDPRKQWRGEQEKMLKDYLSVAQDALRTQKELYHVKEQRLALALDEYVRLNDAYKEKSSSHTSLFSGSSSSTKYDPDILKAEISTTRLRVKKLKRELSQMKQELLYKEQGFETLQQIDKKMSGGQSGYELSEAKAILTELKSIRKAISSGEKEKQDLMQSLAKLQERFHLDQNIGRSEPDLRCSPVNSHLCLSRQTLDAGSQTSISGDIGVRSRSNLAEKVRLSLQYEEAKRSMANLKIELSKLDSEAWPGALDIEKEKLMLINEKEELLKELQFVTPQKRTQDELERLEAERQRLEEELLSVRGTPSRALAERLRLEERRKELLQKLEETTKLTTYLHSQLKSLSASTLSMSSGSSLGSLASSRGSLNTSSRGSLNSLSSTELYYSSQSDQIDVDYQYKLDFLLQEKSGYIPSGPITTIHENEVVKSPSQPGQSGLCGVAAAATGHTPPLAEAPKSVASLSSRSSLSSLSPPGSPLVLEGTFPMSSSHDASLHQFTADFEDCELSSHFADISLIENQILLDSDSGGASQSLSEDKDLNECAREPLYEGTADVEKSLPKRRVIHLLGEKTTCVSAAVSDESVAGDSGVYEAFVKQPSEMEDVTYSEEDVAIVETAQVQIGLRYNAKSSSFMVIIAQLRNLHAFLIPHTSKVYFRVAVLPSSTDVSCLFRTKVHPPTESILFNDVFRVAISQTALQQKTLRVDLCSVSKHRREECLAGTQISLADLPFSSEVFTLWYNLLPSKQMPCKKNEENEDSVFQPNQPLVDSIDLDAVSALLARTSAELLAVEQELAQEEEEESGQEEPRGPDGDWLTMLREASDEIVAEKEAEVKLPEDSSCTEDLSSCTSVPEMNEDGNRKESNCAKDLRSQPPTRIPTLVDKETNTDEAANDNMAVRPKERSSLSSRQHPFVRSSVIVRSQTFSPGERNQYICRLNRSDSDSSTLAKKSLFVRNSTERRSLRVKRTVCQSVLRRTTQECPVRTSLDLELDLQASLTRQSRLNDELQALRDLRQKLEELKAQGETDLPPGVLEDERFQRLLKQAEKQAEQSKEEQKQGLNAEKLMRQVSKDVCRLREQSQKVPRQVQSFREKIAYFTRAKISIPSLPADDV

SEQ ID NO: 38225 - protein, 81 aa, Homo sapiens
  REGION 1..81: note = ENSP00000423238
MPRRAGSGQLPLPRGWEEARDYDGKVFYIDHNTRRTSWIDPRDRLTKPLSFADCVGDELPWGWEAGFDPQIGVYYIDHINS

SEQ ID NO: 38226 - protein, 1143 aa, Homo sapiens
  REGION 1..1143: note = ENSP00000425054
MPRRAGSGQLPLPRGWEEARDYDGKVFYIDHNTRRTSWIDPRDRLTKPLSFADCVGDELPWGWEAGFDPQIGVYYIDHINKTTQIEDPRKQWRGEQEKMLKDYLSVAQDALRTQKELYHVKEQRLALALDEYVRLNDAYKEKSSSHTSLFSGSSSSTKYDPDILKAEISTTRLRVKKLKRELSQMKQELLYKEQGFETLQQIDKKMSGGQSGYELSEAKAILTELKSIRKAISSGEKEKQDLMQSLAKLQERFHLDQNIGRSEPDLRCSPVNSHLCLSRQTLDAGSQTSISGDIGVRSRSNLAEKVRLSLQYEEAKRSMANLKIELSKLDSEAWPGALDIEKEKLMLINEKEELLKELQFVTPQKRTQDELERLEAERQRLEEELLSVRGTPSRALAERLRLEERRKELLQKLEETTKLTTYLHSQLKSLSASTLSMSSGSSLGSLASSRGSLNTSSRGSLNSLSSTELYYSSQSDQIDVDYQYKLDFLLQEKSGYIPSGPITTIHENEVVKSPSQPGQSGLCGVAAAATGHTPPLAEAPKSVASLSSRSSLSSLSPPGSPLVLEGTFPMSSSHDASLHQFTADFEDYVEKSLPKRRVIHLLGEKTTCVSAAVSDESVAGDSGVYEAFVKQPSEMEDVTYSEEDVAIVETAQVQIGLRYNAKSSSFMVIIAQLRNLHAFLIPHTSKVYFRVAVLPSSTDVSCLFRTKVHPPTESILFNDVFRVAISQTALQQKTLRVDLCSVSKHRREECLAGTQISLADLPFSSEVFTLWYNLLPSKQMPCKKNEENEDSVFQPNQPLVDSIDLDAVSALLARTSAELLAVEQELAQEEEEESGQEEPRGPDGDWLTMLREASDEIVAEKEAEVKLPEDSSCTEDLSSCTSVPEMNEDGNRKESNCAKDLRSQPPTRIPTLVDKETNTDEAANDNMAVRPKERSSLSSRQHPFVRSSVIVRSQTFSPGERNQYICRLNRSDSDSSTLAKKSLFVRNSTERRSLRVKRTVCQSVLRRTTQECPVRTSLDLELDLQASLTRQSRLNDELQALRDLRQKLEELKAQGETDLPPGVLEDERFQRLLKQAEKQAEQSKEEQKQGLNAEKLMRQVSKDVCRLREQSQKVPRQVQSFREKIAYFTRAKISIPSLPADDV

SEQ ID NO: 38227 - protein, 1216 aa, Homo sapiens
  REGION 1..1216: note = ENSP00000398577
MPRRAGSGQLPLPRGWEEARDYDGKVFYIDHNTRRTSWIDPRDRLTKPLSFADCVGDELPWGWEAGFDPQIGVYYIDHINKTTQIEDPRKQWRGEQEKMLKDYLSVAQDALRTQKELYHVKEQRLALALDEYVRLNDAYKEKSSSHTSLFSGSSSSTKYDPDILKAEISTTRLRVKKLKRELSQMKQELLYKEQGFETLQQIDKKMSGGQSGYELSEAKAILTELKSIRKAISSGEKEKQDLMQSLAKLQERFHLDQNIGRSEPDLRCSPVNSHLCLSRQTLDAGSQTSISGDIGVRSRSNLAEKVRLSLQYEEAKRSMANLKIELSKLDSEAWPGALDIEKEKLMLINEKEELLKELQFVTPQKRTQDELERLEAERQRLEEELLSVRGTPSRALAERLRLEERRKELLQKLEETTKLTTYLHSQLKSLSASTLSMSSGSSLGSLASSRGSLNTSSRGSLNSLSSTELYYSSQSDQIDVDYQYKLDFLLQEKSGYIPSGPITTIHENEVVKSPSQPGQSGLCGVAAAATGHTPPLAEAPKSVASLSSRSSLSSLSPPGSPLVLEGTFPMSSSHDASLHQFTADFEDCELSSHFADISLIENQILLDSDSGGASQSLSEDKDLNECAREPLYEGTADVEKSLPKRRVIHLLGEKTTCVSAAVSDESVAGDSGVYEAFVKQPSEMEDVTYSEEDVAIVETAQVQIGLRYNAKSSSFMVIIAQLRNLHAFLIPHTSKVYFRVAVLPSSTDVSCLFRTKVHPPTESILFNDVFRVAISQTALQQKTLRVDLCSVSKHRREECLAGTQISLADLPFSSEVFTLWYNLLPSKQMPCKKNEENEDSVFQPNQPLVDSIDLDAVSALLARTSAELLAVEQELAQEEEEESGQEEPRGPDGDWLNTYFLCCWELKDDVFTRLTVKPLLTMLREASDEIVAEKEAEVKLPEDSSCTEDLSSCTSVPEMNEDGNRKESNCAKDLRSQPPTRIPTLVDKETNTDEAANDNMAVRPKERSSLSSRQHPFVRSSVIVRSQTFSPGERNQYICRLNRSDSDSSTLAKKSLFVRNSTERRSLRVKRTVCQSVLRRTTQECPVRTSLDLELDLQASLTRQSRLNDELQALRDLRQKLEELKAQGETDLPPGVLEDERFQRLLKQAEKQAEQSKEEQKQGLNAEKLMRQVSKDVCRLREQSQKVPRQVQSFREKIAYFTRAKISIPSLPADDV

SEQ ID NO: 38228 - protein, 77 aa, Homo sapiens
  REGION 1..77: note = ENSP00000393342
MLKDYLSVAQDALRTQKELYHVKEQRLALALDEYVRLNDAYKEKSSSHTSLFSGSSSSTKYDPDILKAEISTTRLRN

SEQ ID NO: 38229 - protein, 712 aa, Homo sapiens
  REGION 1..712: note = ENSP00000413521
MLKDYLSVAQDALRTQKELYHVKEQRLALALDEYVRLNDAYKEKSSSHTSLFSGSSSSTKYDPDILKAEISTTRLRVKKLKRELSQMKQELLYKEQGFETLQQIDKKMSGGQSGYELSEAKAILTELKSIRKAISSGEKEKQDLMQSLAKLQERFHLDQNIGRSEPDLRCSPVNSHLCLSRQTLDAGSQTSISGDIGVRSRSNLAEKVRLSLQYEEAKRSMANLKIELSKLDSEAWPGALDIEKEKLMLINEKEELLKELQFVTPQKRTQDELERLEAERQRLEEELLSVRGTPSRALAERLRLEERRKELLQKLEETTKLTTYLHSQLKSLSASTLSMSSGSSLGSLASSRGSLNTSSRGSLNSLSSTELYYSSQSDQIDVDYQYKLDFLLQEKSGYIPSGPITTIHENEVVKSPSQPGQSGLCGVAAAATGHTPPLAEAPKSVASLSSRSSLSSLSPPGSPLVLEGTFPMSSSHDASLHQFTADFEDCELSSHFADISLIENQILLDSDSGGASQSLSEDKDLNECAREPLYEGTADVEKSLPKRRVIHLLGEKTTCVSAAVSDESVAGDSGVYEAFVKQPSEMEDVTYSEEDVAIVETAQVQIGLRYNAKSSSFMVIIAQLRNLHAFLIPHTSKVYFRVAVLPSSTDVSCLFRTKVHPPTESILFNDVFRVAISQTALQQKTLRKNFTFVTAITHGVCLPLPVPMPSFA

SEQ ID NO: 38230 - protein, 874 aa, Homo sapiens
  REGION 1..874: note = ENSP00000427569
MANLKIELSKLDSEAWPGALDIEKEKLMLINEKEELLKELQFVTPQKRTQDELERLEAERQRLEEELLSVRGTPSRALAERLRLEERRKELLQKLEETTKLTTYLHSQLKSLSASTLSMSSGSSLGSLASSRGSLNTSSRGSLNSLSSTELYYSSQSDQIDVDYQYKLDFLLQEKSGYIPSGPITTIHENEVVKSPSQPGQSGLCGVAAAATGHTPPLAEAPKSVASLSSRSSLSSLSPPGSPLVLEGTFPMSSSHDASLHQFTADFEDCELSSHFADISLIENQILLDSDSGGASQSLSEDKDLNECAREPLYEGTADVEKSLPKRRVIHLLGEKTTCVSAAVSDESVAGDSGVYEAFVKQPSEMEDVTYSEEDVAIVETAQVQIGLRYNAKSSSFMVIIAQLRNLHAFLIPHTSKVYFRVAVLPSSTDVSCLFRTKVHPPTESILFNDVFRVAISQTALQQKTLRVDLCSVSKHRREECLAGTQISLADLPFSSEVFTLWYNLLPSKQMPCKKNEENEDSVFQPNQPLVDSIDLDAVSALLARTSAELLAVEQELAQEEEEESGQEEPRGPDGDWLTMLREASDEIVAEKEAEVKLPEDSSCTEDLSSCTSVPEMNEDGNRKESNCAKDLRSQPPTRIPTLVDKETNTDEAANDNMAVRPKERSSLSSRQHPFVRSSVIVRSQTFSPGERNQYICRLNRSDSDSSTLAKKSLFVRNSTERRSLRVKRTVCQSVLRRTTQECPVRTSLDLELDLQASLTRQSRLNDELQALRDLRQKLEELKAQGETDLPPGVLEDERFQRLLKQAEKQAEQSKEEQKQGLNAEKLMRQVSKDVCRLREQSQKVPRQVQSFREKIAYFTRAKISIPSLPADDV

SEQ ID NO: 38231 - protein, 320 aa, Homo sapiens
  REGION 1..320: note = ENSP00000420835
MPRLRVHGACLPTKSVLFLFYHRLTMLREASDEIVAEKEAEVKLPEDSSCTEDLSSCTSVPEMNEDGNRKESNCAKDLRSQPPTRIPTLVDKETNTDEAANDNMAVRPKERSSLSSRQHPFVRSSVIVRSQTFSPGERNQYICRLNRSDSDSSTLAKKSLFVRNSTERRSLRVKRTVCQSVLRRTTQECPVRTSLDLELDLQASLTRQSRLNDELQALRDLRQKLEELKAQGETDLPPGVLEDERFQRLLKQAEKQAEQSKEEQKQGLNAEKLMRQVSKDVCRLREQSQKVPRQVQSFREKIAYFTRAKISIPSLPADDV

SEQ ID NO: 38232 - protein, 579 aa, Homo sapiens
  REGION 1..579: note = ENSP00000477059
MAAKSDGAAASASPDPEGAAGGARGSAGGRGEAAAAAGPPGVVGAGGPGPRYELRDCCWVLCALLVFFSDGATDLWLAASYYLQNQHTYFSLTLLFVLLPSLVVQLLSFRWFVYDYSEPAGSPGPAVSTKDSVAGGAAISTKDSAGAFRTKEGSPEPGPQPAPSSASAYRRRCCRLCIWLLQTLVHLLQLGQVWRYLRALYLGLQSRWRGERLRRHFYWQMLFESADVSMLRLLETFLRSAPQLVLQLSLLVHRGGAPDLLPALSTSASLVSLAWTLASYQKVLRDSRDDKRPLSYKGAVAQVLWHLFSIAARGLAFALFASVYKLYFGIFIVAHWCVMTFWVIQGETDFCMSKWEEIIYNMVVGIIYIFCWFNVKEGRSRRRMTLYHCIVLLENAALTGFWYSSRNFSTDFYSLIMVCVVASSFALGIFFMCVYYCLLHPNGPMLGPQAPGCIFRKASEPCGPPADAITSPPRSLPRTTGAERDGASAGERAGTPTPPVFQVRPGLPPTPVARTLRTEGPVIRIDLPRKKYPAWDAHFIDRRLRKTILALEYSSPATPRLQYRSVGTSQELLEYETTV

SEQ ID NO: 38233 - protein, 241 aa, Homo sapiens
  REGION 1..241: note = ENSP00000436390
MSRKESWKVKSEIPKVPKQPLVLHHPRMTTTKSPSKDMLEPEAELAEDLPTTKSTSVESEMPTENLEGHSPSCRTFVPLPPICSNSTVHSEETLSHLSDTTVRLSPERPSDEDSKSTESIFLTQVSELPSSVIHKDDLELKEKDQKKPPTAPREVKGTRRKLPTAFLPSKYHGYEELLTAKPDPAFIEPKGIQKNAQALQQMLKHPLLCHSSKPKLDTLQKPYVHKEKRVLSCTSGQNGGW

SEQ ID NO: 38234 - protein, 792 aa, Homo sapiens
  REGION 1..792: note = ENSP00000339918
MAFSGIYKLDDGKPYLNNCFPARNLLRVPEEGQGHWLVVQKGNLKKKPKGLVGAQAERRESLKATSFEFKGKKESRRENQVDLPGHILDQAFLLKHHCVRKPSDLCTINAKENDFKHFHSVIYINASENLLPLEAFHTFPALKELDLAFNGIKTIYVKYGDFKLLEFLDLSFNSLTVEAICDLGILPHLRVLLLTGNGLTSLPPNLAVAEQEASVTSLTSKRYILRFPALETLMLDDNRLSNPSCFASLAGLRRLKKLSLDENRIIRIPYLQQVQLYDESVDWNGGRGSPHKEPQFMLQSKPRMLEDSDEQLDYTVLPMKKDVDRTEVVFSSYPGFSTSETTKICSLPPIFEILPVKSLKARNQTLAPPFPELRYLSLAYNKIAKEDAVLPVALFPSLCEFVFHNNPLVAHTRGVPPLLKSFLQERLGIHLIRRKIVKPKHHVLMSRKESWKVKSEIPKVPKQPLVLHHPRMTTTKSPSKDMLEPEAELAEDLPTTKSTSVESEMPTENLEGHSPSCRTFVPLPPICSNSTVHSEETLSHLSDTTVRLSPERPSDEDSKSTESIFLTQVSELPSSVIHKDDLELKEKDQKKPPTAPREVKGTRRKLPTAFLPSKYHGYEELLTAKPDPAFIEPKGIQKNAQALQQMLKHPLLCHSSKPKLDTLQKPYVHKEKRAQRIPIPPPKKTRAQLLDDIFIRLRDPRNITEAPLGAVLHQWTERRLVNHKQYLEAKRLLKEFQARYRQLVSGSLRTVFGTTPLPMACPALSESQPKFGHFLEFMDEFCQEPTASDSQG

SEQ ID NO: 38235 - protein, 517 aa, Homo sapiens
  REGION 1..517: note = ENSP00000319303
MLDDNRLSNPSCFASLAGLRRLKKLSLDENRIIRIPYLQQVQLYDESVDWNGGRGSPHKEPQFMLQSKPRMLEDSDEQLDYTVLPMKKDVDRTEVVFSSYPGFSTSEIAKEDAVLPVALFPSLCEFVFHNNPLVAHTRGVPPLLKSFLQERLGIHLIRRKIVKPKHHVLMSRKESWKVKSEIPKVPKQPLVLHHPRMTTTKSPSKDMLEPEAELAEDLPTTKSTSVESEMPTENLEGHSPSCRTFVPLPPICSNSTVHSEETLSHLSDTTVRLSPERPSDEDSKSTESIFLTQVSELPSSVIHKDDLELKEKDQKKPPTAPREVKGTRRKLPTAFLPSKYHGYEELLTAKPDPAFIEPKGIQKNAQALQQMLKHPLLCHSSKPKLDTLQKPYVHKEKRAQRIPIPPPKKTRAQLLDDIFIRLRDPRNITEAPLGAVLHQWTERRLVNHKQYLEAKRLLKEFQARYRQLVSGSLRTVFGTTPLPMACPALSESQPKFGHFLEFMDEFCQEPTASDSQG

SEQ ID NO: 38236 - protein, 115 aa, Homo sapiens
  REGION 1..115: note = ENSP00000433431
MLDDNRLSNPSCFASLAGLRRLKKLSLDENRIIRIPYLQQVQLYDESVDWNGGRGSPHKEPQFMLQSKPRMLEDSDEQLDYTVLPMKKDVDRTDRKRGCCPTSSSLPISLRVRLS

SEQ ID NO: 38237 - protein, 63 aa, Homo sapiens
  REGION 1..63: note = ENSP00000432689
  VARIANT 1: note = Any amino acid
XRGSPHKEPQFMLQSKPRMLEDSDEQLDYTVLPMKKDVDRTDRKRGCCPTSSSLPISLRVRLS

SEQ ID NO: 38238 - protein, 598 aa, Homo sapiens
  REGION 1..598: note = ENSP00000435838
MAFSGIYKLDDGKPYLNNCFPARNLLRVPEEGQGHWLVVQKGNLKKKPKGLVGAQAERRESLKATSFEFKGKKESRRENQVDLPGHILDQAFLLKHHCVRKPSDLCTINAKENDFKHFHSVIYINASENLLPLEAFHTFPALKELDLAFNGIKTIYVKYGDFKLLEFLDLSFNSLTVEAICDLGILPHLRVLLLTGNGLTSLPPNLAVAEQEASVTSLTSKRYILRFPALETLMLDDNRLSNPSCFASLAGLRRLKKLSLDENRIIRIPYLQQVQLYDESVDWNGGRGSPHKEPQFMLQSKPRMLEDSDEQLDYTVLPMKKDVDRTGVPPLLKSFLQERLGIHLIRRKIVKPKHHVLMSRKESWKVKSEIPKVPKQPLVLHHPRMTTTKSPSKDMLEPEAELAEDLPTTKSTSVESEMPTENLEGHSPSCRTFVPLPPICSNSTVHSEETLSHLSDTTVRLSPERPSDEDSKSTESIFLTQVSELPSSVIHKDDLELKEKDQKKPPTAPREVKGTRRKLPTAFLPSKYHGYEELLTAKPDPAFIEPKGIQKNAQALQQMLKHPLLCHSSKPKLDTLQKPYVHKEKRVLSCTSGQNGGW

SEQ ID NO: 38239 - protein, 296 aa, Homo sapiens
  REGION 1..296: note = ENSP00000437334
MAFSGIYKLDDGKPYLNNCFPARNLLRVPEEGQGHWLVVQKGNLKKKPKGLVGAQAERRESLKATSFEFKGKKESRRENQVDLPGHILDQAFLLKHHCVRKPSDLCTINVSGLKFSKAKENDFKHFHSVIYINASENLLPLEAFHTFPALKELDLAFNGIKTIYVKYGDFKLLEFLDLSFNSLTVEAICDLGILPHLRVLLLTGNGLTSLPPNLAVAEQEASVTSLTSKRYILRFPALETLMLDDNRLSNPSCFASLAGLRRLKKLSLDENRIIRIPYLQQVQLYDESVDWNGGRG

SEQ ID NO: 38240 - protein, 55 aa, Homo sapiens
  REGION 1..55: note = ENSP00000435662
MLDDNRLSNPSCFASLAGLRRLKKLSLDENRIIRIPYLQQVQLYDESVDWNGGRG

SEQ ID NO: 38241 - protein, 19 aa, Homo sapiens
  REGION 1..19: note = ENSP00000433940
MLDDNRLSNPSCFASLAGL

SEQ ID NO: 38242 - protein, 959 aa, Homo sapiens
  REGION 1..959: note = ENSP00000261381
MVAAPCARRLARRSHSALLAALTVLLLQTLVVWNFSSLDSGAGERRGGAAVGGGEQPPPAPAPRRERRDLPAEPAAARGGGGGGGGGGGGRGPQARARGGGPGEPRGQQPASRGALPARALDPHPSPLITLETQDGYFSHRPKEKVRTDSNNENSVPKDFENVDNSNFAPRTQKQKHQPELAKKPPSRQKELLKRKLEQQEKGKGHTFPGKGPGEVLPPGDRAAANSSHGKDVSRPPHARKTGGSSPETKYDQPPKCDISGKEAISALSRAKSKHCRQEIGETYCRHKLGLLMPEKVTRFCPLEGKANKNVQWDEDSVEYMPANPVRIAFVLVVHGRASRQLQRMFKAIYHKDHFYYIHVDKRSNYLHRQVLQVSRQYSNVRVTPWRMATIWGGASLLSTYLQSMRDLLEMTDWPWDFFINLSAADYPIRTNDQLVAFLSRYRDMNFLKSHGRDNARFIRKQGLDRLFLECDAHMWRLGDRRIPEGIAVDGGSDWFLLNRRFVEYVTFSTDDLVTKMKQFYSYTLLPAESFFHTVLENSPHCDTMVDNNLRITNWNRKLGCKCQYKHIVDWCGCSPNDFKPQDFHRFQQTARPTFFARKFEAVVNQEIIGQLDYYLYGNYPAGTPGLRSYWENVYDEPDGIHSLSDVTLTLYHSFARLGLRRAETSLHTDGENSCRYYPMGHPASVHLYFLADRFQGFLIKHHATNLAVSKLETLETWVMPKKVFKIASPPSDFGRLQFSEVGTDWDAKERLFRNFGGLLGPMDEPVGMQKWGKGPNVTVTVIWVDPVNVIAATYDILIESTAEFTHYKPPLNLPLRPGVWTVKILHHWVPVAETKFLVAPLTFSNRQPIKPEEALKLHNGPLRNAYMEQSFQSLNPVLSLPINPAQVEQARRNAASTGTALEGWLDSLVGGMWTAMDICATGPTACPVMQTCSQTAWSSFSPDPKSELGAVKPDGRLR

SEQ ID NO: 38243 - protein, 364 aa, Homo sapiens
  REGION 1..364: note = ENSP00000007699
MSEVEAAAGATAVPAATVPATAAGVVAVVVPVPAGEPQKGGGAGGGGGAASGPAAGTPSAPGSRTPGNPATAVSGTPAPPARSQADKPVLAIQVLGTVKWFNVRNGYGFINRNDTKEDVFVHQTAIKRNNPRKFLRSVGDGETVEFDVVEGEKGAEATNVTGPGGVPVKGSRYAPNRRKSRRFIPRPPSVAPPPMVAEIPSAGTGPGSKGERAEDSGQRPRRWCPPPFFYRRRFVRGPRPPNQQQPIEGTDRVEPKETAPLEGHQQQGDERVPPPRFRPRYRRPFRPRPRQQPTTEGGDGETKPSQGPADGSRPEPQRPRNRPYFQRRRQQAPGPQQAPGPRQPAAPETSAPVNSGDPTTTILE

SEQ ID NO: 38244 - protein, 164 aa, Homo sapiens
  REGION 1..164: note = ENSP00000459587
  VARIANT 1: note = Any amino acid
XAGTGPGSKGERAEDSGQRPRRWCPPPFFYRRRFVRGPRPPNQQQPIEGTDRVEPKETAPLEGHQQQGDERVPPPRFRPRYRRPFRPRPRQQPTTEGGDGETKPSQGPADGSRPEPQRPRNRPYFQRRRQQAPGPQQAPGPRQPAAPETSAPVNSGDPTTTILE

SEQ ID NO: 38245 - protein, 548 aa, Homo sapiens
  REGION 1..548: note = ENSP00000464380
MLDLIMGCIKSKENKSPAIKYRPENTPEPVSTSVSHYGAEPTTVSPCPSSSAKGTAVNFSSLSMTPFGGSSGVTPFGGASSSFSVVPSSYPAGLTGGVTIFVALYDYEARTTEDLSFKKGERFQIINNTEGDWWEARSIATGKNGYIPSNYVAPADSIQAEEWYFGKMGRKDAERLLLNPGNQRGIFLVRESETTKGAYSLSIRDWDEIRGDNVKHYKIRKLDNGGYYITTRAQFDTLQKLVKHYTEHADGLCHKLTTVCPTVKPQTQGLAKDAWEIPRESLRLEVKLGQGCFGEVWMGTWNGTTKVAIKTLKPGTMMPEAFLQEAQIMKKLRHDKLVPLYAVVSEEPIYIVTEFMSKGSLLDFLKEGDGKYLKLPQLVDMAAQIADGMAYIERMNYIHRDLRAANILVGENLVCKIADFGLARLIEDNEYTARQGAKFPIKWTAPEAALYGRFTIKSDVWSFGILQTELVTKGRVPYPGMVNREVLEQVERGYRMPCPQGCPESLHELMNLCWKKDPDERPTFEYIQSFLEDYFTATEPQYQPGENL

SEQ ID NO: 38246 - protein, 543 aa, Homo sapiens
  REGION 1..543: note = ENSP00000462468
MGCIKSKENKSPAIKYRPENTPEPVSTSVSHYGAEPTTVSPCPSSSAKGTAVNFSSLSMTPFGGSSGVTPFGGASSSFSVVPSSYPAGLTGGVTIFVALYDYEARTTEDLSFKKGERFQIINNTEGDWWEARSIATGKNGYIPSNYVAPADSIQAEEWYFGKMGRKDAERLLLNPGNQRGIFLVRESETTKGAYSLSIRDWDEIRGDNVKHYKIRKLDNGGYYITTRAQFDTLQKLVKHYTEHADGLCHKLTTVCPTVKPQTQGLAKDAWEIPRESLRLEVKLGQGCFGEVWMGTWNGTTKVAIKTLKPGTMMPEAFLQEAQIMKKLRHDKLVPLYAVVSEEPIYIVTEFMSKGSLLDFLKEGDGKYLKLPQLVDMAAQIADGMAYIERMNYIHRDLRAANILVGENLVCKIADFGLARLIEDNEYTARQGAKFPIKWTAPEAALYGRFTIKSDVWSFGILQTELVTKGRVPYPGMVNREVLEQVERGYRMPCPQGCPESLHELMNLCWKKDPDERPTFEYIQSFLEDYFTATEPQYQPGENL

SEQ ID NO: 38247 - protein, 543 aa, Homo sapiens; identical to SEQ ID NO: 38246
  REGION 1..543: note = ENSP00000324740

SEQ ID NO: 38248 - protein, 257 aa, Homo sapiens
  REGION 1..257: note = ENSP00000274496
MSGFENLNTDFYQTSYSIDDQSQQSYDYGGSGGPYSKQYAGYDYSQQGRFVPPDMMQPQQPYTGQIYQPTQAYTPASPQPFYGNNFEDEPPLLEELGINFDHIWQKTLTVLHPLKVADGSIMNETDLAGPMVFCLAFGATLLLAGKIQFGYVYGISAIGCLGMFCLLNLMSMTGVSFGCVASVLGYCLLPMILLSSFAVIFSLQGMVGIILTAGIIGWCSFSASKIFISALAMEGQQLLVAYPCALLYGVFALISVF

SEQ ID NO: 38249 - protein, 257 aa, Homo sapiens; identical to SEQ ID NO: 38248
  REGION 1..257: note = ENSP00000397704

SEQ ID NO: 38250 - protein, 203 aa, Homo sapiens
  REGION 1..203: note = ENSP00000425422
MMQPQQPYTGQIYQPTQAYTPASPQPFYGNNFEDEPPLLEELGINFDHIWQKTLTVLHPLKVADGSIMNETDLAGPMVFCLAFGATLLLAGKIQFGYVYGISAIGCLGMFCLLNLMSMTGVSFGCVASVLGYCLLPMILLSSFAVIFSLQGMVGIILTAGIIGWCSFSASKIFISALAMEGQQLLVAYPCALLYGVFALISVF

SEQ ID NO: 38251 - protein, 177 aa, Homo sapiens
  REGION 1..177: note = ENSP00000429777
MMQPQQPYTGQIYQPTQAYTPASPQPFYGNNFEDEPPLLEELGINFDHIWQKTLTVLHPLKVADGSIMNETDLAGPMVFCLAFGATLLLAGKIQFGYVYGISAIGCLGMFCLLNLMSMTGVSFGCVASVLGYCLLPMILLSSFAVIFSLQGMVGIILTAGIIGWCSFSASKIFISAL

SEQ ID NO: 38252 - protein, 101 aa, Homo sapiens
  REGION 1..101: note = ENSP00000428715
MMQPQQPYTGQIYQPTQAYTPASPQPFYGNNFEDEPPLLEELGINFDHIWQKTLTVLHPLKVADGSIMNETDLAGPMVFCLAFGATLLLAGKIQFGYVYGI

SEQ ID NO: 38253 - protein, 256 aa, Homo sapiens
  REGION 1..256: note = ENSP00000412696
MSNLAQFDSDFYQSNFTIDNQEQSGNDSNAYGNLYGSRKQQAGEQPQPASFVPSEMLMSSGYAGQFFQPASNSDYYSQSPYIDSFDEEPPLLEELGIHFDHIWQKTLTVLNPMKPVDGSIMNETDLTGPILFCVALGATLLLAGKVQFGYVYGMSAIGCLVIHALLNLMSSSGVSYGCVASVLGYCLLPMVILSGCAMFFSLQGIFGIMSSLVIIGWCSLSASKIFIAALHMEGQQLLVAYPCAILYGLFALLTIF

SEQ ID NO: 38254 - protein, 39 aa, Homo sapiens
  REGION 1..39: note = ENSP00000477355
MSNLAQFDSDFYQSNFTIDNQEQSGNDSNAYGNLYGSRK

SEQ ID NO: 38255 - protein, 280 aa, Homo sapiens
  REGION 1..280: note = ENSP00000332772
MDLLKISHTKLHLLEDLSIKNKQRMSNLAQFDSDFYQSNFTIDNQEQSGNDSNAYGNLYGSRKQQAGEQPQPASFVPSEMLMSSGYAGQFFQPASNSDYYSQSPYIDSFDEEPPLLEELGIHFDHIWQKTLTVLNPMKPVDGSIMNETDLTGPILFCVALGATLLLAGKVQFGYVYGMSAIGCLVIHALLNLMSSSGVSYGCVASVLGYCLLPMVILSGCAMFFSLQGIFGIMSSLVIIGWCSLSASKIFIAALHMEGQQLLVAYPCAILYGLFALLTIF

SEQ ID NO: 38256 - protein, 673 aa, Homo sapiens
  REGION 1..673: note = ENSP00000338157
MDLTKMGMIQLQNPSHPTGLLCKANQMRLAGTLCDVVIMVDSQEFHAHRTVLACTSKMFEILFHRNSQHYTLDFLSPKTFQQILEYAYTATLQAKAEDLDDLLYAAEILEIEYLEEQCLKMLETIQASDDNDTEATMADGGAEEEEDRKARYLKNIFISKHSSEESGYASVAGQSLPGPMVDQSPSVSTSFGLSAMSPTKAAVDSLMTIGQSLLQGTLQPPAGPEEPTLAGGGRHPGVAEVKTEMMQVDEVPSQDSPGAAESSISGGMGDKVEERGKEGPGTPTRSSVITSARELHYGREESAEQVPPPAEAGQAPTGRPEHPAPPPEKHLGIYSVLPNHKADAVLSMPSSVTSGLHVQPALAVSMDFSTYGGLLPQGFIQRELFSKLGELAVGMKSESRTIGEQCSVCGVELPDNEAVEQHRKLHSGMKTYGCELCGKRFLDSLRLRMHLLAHSAGAKAFVCDQCGAQFSKEDALETHRQTHTGTDMAVFCLLCGKRFQAQSALQQHMEVHAGVRSYICSECNRTFPSHTALKRHLRSHTGDHPYECEFCGSCFRDESTLKSHKRIHTGEKPYECNGCGKKFSLKHQLETHYRVHTGEKPFECKLCHQRSRDYSAMIKHLRTHNGASPYQCTICTEYCPSLSSMQKHMKGHKPEEIPPDWRIEKTYLYLCYV

SEQ ID NO: 38257 - protein, 115 aa, Homo sapiens
  REGION 1..115: note = ENSP00000437716
MDLTKMGMIQLQNPSHPTGLLCKANQMRLAGTLCDVVIMVDSQEFHAHRTVLACTSKMFEILFHRNSQHYTLDFLSPKTFQQILEYAYTATLQAKAEDLDDLLYAAEILEIEYLE

SEQ ID NO: 38258 - protein, 148 aa, Homo sapiens
  REGION 1..148: note = ENSP00000443013
MDLTKMGMIQLQNPSHPTGLLCKANQMRLAGTLCDVVIMVDSQEFHAHRTVLACTSKMFEILFHRNSQHYTLDFLSPKTFQQILEYAYTATLQAKAEDLDDLLYAAEILEIEYLEEQCLKMLETIQASDDNDTEATMADGGAEEEEDR

SEQ ID NO: 38259 - protein, 673 aa, Homo sapiens; identical to SEQ ID NO: 38256
  REGION 1..673: note = ENSP00000376721

SEQ ID NO: 38260 - protein, 55 aa, Homo sapiens
  REGION 1..55: note = ENSP00000445047
  VARIANT 1: note = Any amino acid
XGGLLPQGFIQRELFSKLGELAVGMKSESRTIGEQCSVCGVELPDNEAVEQHRVF

SEQ ID NO: 38261 - protein, 865 aa, Homo sapiens
  REGION 1..865: note = ENSP00000381517
MEGLLHYINPAHAISLLSALNEERLKGQLCDVLLIVGDQKFRAHKNVLAASSEYFQSLFTNKENESQTVFQLDFCEPDAFDNVLNYIYSSSLFVEKSSLAAVQELGYSLGISFLTNIVSKTPQAPFPTCPNRKKVFVEDDENSSQKRSVIVCQSRNEAQGKTVSQNQPDVSHTSRPSPSIAVKANTNKPHVPKPIEPLHNLSLTEKSWPKDSSVVYAKSLEHSGSLDDPNRISLVKRNAVLPSKPLQDREAMDDKPGVSGQLPKGKALELALKRPRPPVLSVCSSSETPYLLKETNKGNGQGEDRNLLYYSKLGLVIPSSGSGSGNQSIDRSGPLVKSLLRRSLSMDSQVPVYSPSIDLKSSQGSSSVSSDAPGNVLCALSQKSSLKDCSEKTALDDRPQVLQPHRLRSFSASQSTDREGASPVTEVRIKTEPSSPLSDPSDIIRVTVGDAATTAAASSSSVTRDLSLKTEDDQKDMSRLPAKRRFQADRRLPFKKLKVNEHGSPVSEDNFEEGSSPTLLDADFPDSDLNKDEFEQGSHERLCRNAAVCPYCSLRFFSPELKQEHESKCEYKKLTCLECMRTFKSSFSIWRHQVEVHNQNNMAPTENFSLPVLDHNGDVTGSSRPQSQPEPNKVNHIVTTKDDNVFSDSSEQVNFDSEDSSCLPEDLSLSKQLKIQVKEEPVEEAEEEAPEASTAPKEAGPSKEASLWPCEKCGKMFTVHKQLERHQELLCSVKPFICHVCNKAFRTNFRLWSHFQSHMSQASEESAHKESEVCPVPTNSPSPPPLPPPPPLPKIQPLEPDSPTGLSENPTPATEKLFVPQESDTLFYHAPPLSAITFKRQFMCKLCHRTFKTAFSLWSHEQTHN

SEQ ID NO: 38262 - protein, 1066 aa, Homo sapiens
  REGION 1..1066: note = ENSP00000308759
MEGLLHYINPAHAISLLSALNEERLKGQLCDVLLIVGDQKFRAHKNVLAASSEYFQSLFTNKENESQTVFQLDFCEPDAFDNVLNYIYSSSLFVEKSSLAAVQELGYSLGISFLTNIVSKTPQAPFPTCPNRKKVFVEDDENSSQKRSVIVCQSRNEAQGKTVSQNQPDVSHTSRPSPSIAVKANTNKPHVPKPIEPLHNLSLTEKSWPKDSSVVYAKSLEHSGSLDDPNRISLVKRNAVLPSKPLQDREAMDDKPGVSGQLPKGKALELALKRPRPPVLSVCSSSETPYLLKETNKGNGQGEDRNLLYYSKLGLVIPSSGSGSGNQSIDRSGPLVKSLLRRSLSMDSQVPVYSPSIDLKSSQGSSSVSSDAPGNVLCALSQKSSLKDCSEKTALDDRPQVLQPHRLRSFSASQSTDREGASPVTEVRIKTEPSSPLSDPSDIIRVTVGDAATTAAASSSSVTRDLSLKTEDDQKDMSRLPAKRRFQADRRLPFKKLKVNEHGSPVSEDNFEEGSSPTLLDADFPDSDLNKDEFGELEGTRPNKKFKCKHCLKIFRSTAGLHRHVNMYHNPEKPYACDICHKRFHTNFKVWTHCQTQHGIVKNPSPASSSHAVLDEKFQRKLIDIVREREIKKALIIKLRRGKPGFQGQSSSQAQQVIKRNLRSRAKGAYICTYCGKAYRFLSQFKQHIKMHPGEKPLGVNKVAKPKEHAPLASPVENKEVYQCRLCNAKLSSLLEQGSHERLCRNAAVCPYCSLRFFSPELKQEHESKCEYKKLTCLECMRTFKSSFSIWRHQVEVHNQNNMAPTENFSLPVLDHNGDVTGSSRPQSQPEPNKVNHIVTTKDDNVFSDSSEQVNFDSEDSSCLPEDLSLSKQLKIQVKEEPVEEAEEEAPEASTAPKEAGPSKEASLWPCEKCGKMFTVHKQLERHQELLCSVKPFICHVCNKAFRTNFRLWSHFQSHMSQASEESAHKESEVCPVPTNSPSPPPLPPPPPLPKIQPLEPDSPTGLSENPTPATEKLFVPQESDTLFYHAPPLSAITFKRQFMCKLCHRTFKTAFSLWSHEQTHN

SEQ ID NO: 38263 - protein, 1066 aa, Homo sapiens; identical to SEQ ID NO: 38262
  REGION 1..1066: note = ENSP00000381512

SEQ ID NO: 38264 - protein, 1066 aa, Homo sapiens; identical to SEQ ID NO: 38262
  REGION 1..1066: note = ENSP00000381523

SEQ ID NO: 38265 - protein, 118 aa, Homo sapiens
  REGION 1..118: note = ENSP00000387788
MEGLLHYINPAHAISLLSALNEERLKGQLCDVLLIVGDQKFRAHKNVLAASSEYFQSLFTNKENESQTVFQLDFCEPDAFDNVLNYIYSSSLFVEKSSLAAVQELGYSLGISFLTNIV

SEQ ID NO: 38266 - protein, 49 aa, Homo sapiens
  REGION 1..49: note = ENSP00000395186
MEGLLHYINPAHAISLLSALNEERLKGQLCDVLLIVGDQKFRAHKNVLA

SEQ ID NO: 38267 - protein, 49 aa, Homo sapiens; identical to SEQ ID NO: 38266
  REGION 1..49: note = ENSP00000381510

SEQ ID NO: 38268 - protein, 589 aa, Homo sapiens
  REGION 1..589: note = ENSP00000245663
MNNRKEDMEITSHYRHLLRELNEQRQHGVLCDVCVVVEGKVFKAHKNVLLGSSRYFKTLYCQVQKTSEQATVTHLDIVTAQGFKAIIDFMYSAHLALTSRNVIEVMSAASFLQMTDIVQACHDFIKAALDISIKSDASDELAEFEIGASSSSSTEALISAVMAGRSISPWLARRTSPANSSGDSAIASCHDGGSSYGKEDQEPKADGPDDVSSQPLWPGDVGYGPLRIKEEQVSPSQYGGSELPSAKDGAVQNSFSEQSAGDAWQPTGRRKNRKNKETVRHITQQVEDDSRASSPVPSFLPTSGWPFSSRDSNADLSVTEASSSDSRGERAELYAQVEEGLLGGEASYLGPPLTPEKDDALHQATAVANLRAALMSKNSLLSLKADVLGDDGSLLFEYLPRGAHSLSLNEFTVIRKKFKCPYCSFSAMHQCILKRHMRSHTGERPYPCEICGKKFTRREHMKRHTLVHSKDKKYVCKVCSRVFMSAASVGIRHGSRRHGVCTDCAGRGMAGPLDHGGGGGEGSPEALFPGDGPYLEDPEDPRGEAEELGEDDEGLAPEDALLADDKDEEDSPRPRSPPGGPDKDFAWLS

SEQ ID NO: 38269 - protein, 589 aa, Homo sapiens; identical to SEQ ID NO: 38268
  REGION 1..589: note = ENSP00000303102

SEQ ID NO: 38270 - protein, 589 aa, Homo sapiens; identical to SEQ ID NO: 38268
  REGION 1..589: note = ENSP00000378536

SEQ ID NO: 38271 - protein, 310 aa, Homo sapiens
  REGION 1..310: note = ENSP00000340590
MEKCTKSSSTMQVEPSFLQAENLILRLQMQHPTTENTAKRGQVMPALATTVMPVPYSLEHLTQFHGDPANCSEFLTQVTTYLTALQISNPANDAQIKLFFDYLSQQLESCGIISGPDKSTLLKQYENLILEFQQSFGKPTKQEINPLMNAKFDKGDNSSQQDPATFHLLAQNLICNETNQSGQFEKALADPNQDEESVTDMMDNLPDLITQCIQLDKKHSDRPELLQSETQLPLLASLIQHQALFSPTDPPPKKGPIQLREGQLPLTPAKRARQQETQLCLYCSQSGHFTRDCLAKRSRAPATTNNTAHQ

SEQ ID NO: 38272 - protein, 241 aa, Homo sapiens
  REGION 1..241: note = ENSP00000361411
MSLLSAIDTSAASVYQPAQLLNWVYLSLQDTHQASAFDAFRPEPTAGAAPPELAFGKGRPEQLGSPLHSSYLNSFFQLQRGEALSNSVYKGASPYGSLNNIADGLSSLTEHFSDLTLTSEARKPSKRPPPNYLCHLCFNKGHYIKDCPQARPKGEGLTPYQGKKRCFGEYKCPKCKRKWMSGNSWANMGQECIKCHINVYPHKQRPLEKPDGLDVSDQSKEHPQHLCEKCKVLGYYCRRVQ

SEQ ID NO: 38273 - protein, 228 aa, Homo sapiens
  REGION 1..228: note = ENSP00000361408
MQEVCSGEDTHGGHFPSRPGHTGAEQQCVQGRLTLWLPQQHRRWPQLPHRALLRPDPHLRGSQAQQAAPTQLPVPPVLQQRTLHQGLPPGTPQRRGPDSIPGQKALLRRVQVSQVQEKMDERELLGQHGAGVHQVPHQRVSTQAETPGEARRPGRVRPEQGAPAAPLREVQGPGLLLPSRAVTGCPPAPRATPRQPEETLLPCATPRGCVSPCAWGALAGLRGWAGGS

SEQ ID NO: 38274 - protein, 473 aa, Homo sapiens
  REGION 1..473: note = ENSP00000410713
MPPGGGGPMKDCEYSQISTHSSSPMESPHKKKKIAARRKWEVFPGRNKFFCNGRIMMARQTGVFYLTLVLILVTSGLFFAFDCPYLAVKITPAIPAVAGILFFFVMGTLLRTSFSDPGVLPRATPDEAADLERQIDIANGTSSGGYRPPPRTKEVIINGQTVKLKYCFTCKIFRPPRASHCSLCDNCVERFDHHCPWVGNCVGKRNYRFFYMFILSLSFLTVFIFAFVITHVILRSQQTGFLNALKDSPASVLEAVVCFFSVWSIVGLSGFHTYLISSNQTTNEDIKGSWSNKRGKENYNPYSYGNIFTNCCVALCGPISPSLIDRRGYIQPDTPQPAAPSNGITMYGATQSQSDMAAATPLLQSEPSLTSDELHLPGKPGLGTPCASLTLGPPTPPASMPNLAEATLADVMPRKDEHMGHQFLTPDEAPSPPRLLAAGSPLAHSRTMHVLGLASQDSLHEDSVRGLVKLSSV

SEQ ID NO: 38275 - protein, 488 aa, Homo sapiens
  REGION 1..488: note = ENSP00000352821
MPPGGGGPMKDCEYSQISTHSSSPMESPHKKKKIAARRKWEVFPGRNKFFCNGRIMMARQTGVFYLTLVLILVTSGLFFAFDCPYLAVKITPAIPAVAGILFFFVMGTLLRTSFSDPGVLPRATPDEAADLERQIDIANGTSSGGYRPPPRTKEVIINGQTVKLKYCFTCKIFRPPRASHCSLCDNCVERFDHHCPWVGNCVGKRNYRFFYMFILSLSFLTVFIFAFVITHVILRSQQTGFLNALKDSPASVLEAVVCFFSVWSIVGLSGFHTYLISSNQTTNEDIKGSWSNKRGKENYNPYSYGNIFTNCCVALCGPISPSLIDRRGYIQPDTPQPAAPSNGITMYGATQSQSDMCDQDQCIQSTKFVLQAAATPLLQSEPSLTSDELHLPGKPGLGTPCASLTLGPPTPPASMPNLAEATLADVMPRKDEHMGHQFLTPDEAPSPPRLLAAGSPLAHSRTMHVLGLASQDSLHEDSVRGLVKLSSV

SEQ ID NO: 38276 - protein, 123 aa, Homo sapiens
  REGION 1..123: note = ENSP00000428211
  VARIANT 1: note = Any amino acid
XCPYLAVKITPAIPAVAGILFFFVMGTLLRTSFSDPGVLPRATPDEAADLERQIDIANGTSSGGYRPPPRTKEVIINGQTVKLKYCFTCKIFRPPRASHCSLCDNCVERFDHHCPWVHSKQDS

SEQ ID NO: 38277 - protein, 109 aa, Homo sapiens
  REGION 1..109: note = ENSP00000345721
  VARIANT 1: note = Any amino acid
XGGYRPPPRTKEVIINGQTVKLKYCFTCKIFRPPRASHCSLCDNCVVFIFAFVITHVILRSQQTGFLNALKDSPASVLEAVVCFFSVWSIVGLSGFHTYLISSNQTTNE

SEQ ID NO: 38278 - protein, 367 aa, Homo sapiens
  REGION 1..367: note = ENSP00000262096
MAPSGPGSSARRRCRRVLYWIPVVFITLLLGWSYYAYAIQLCIVSMENTGEQVVCLMAYHLLFAMFVWSYWKTIFTLPMNPSKEFHLSYAEKDLLEREPRGEAHQEVLRRAAKDLPIYTRTMSGAIRYCDRCQLIKPDRCHHCSVCDKCILKMDHHCPWVNNCVGFSNYKFFLLFLAYSLLYCLFIAATDLQYFIKFWTNGLPDTQAKFHIMFLFFAAAMFSVSLSSLFGYHCWLVSKNKSTLEAFRSPVFRHGTDKNGFSLGFSKNMRQVFGDEKKYWLLPIFSSLGDGCSFPTCLVNQDPEQASTPAGLNSTAKNLENHQFPAKPLRESQSHLLTDSQSWTESSINPGKCKAGMSNPALTMENET

SEQ ID NO: 38279 - protein, 7 aa, Homo sapiens
  REGION 1..7: note = ENSP00000430804
MENTGEQ

SEQ ID NO: 38280 - protein, 130 aa, Homo sapiens
  REGION 1..130: note = ENSP00000430317
MENTGEQVVCLMAYHLLFAMFVWSYWKTIFTLPMNPSKEFHLSYAEKDLLEREPRGEAHQEVLRRAAKDLPIYTRTMSGAIRYCDRCQLIKPDRCHHCSVCDKCILKMDHHCPWVNNCVGFSNYKFFLLF

SEQ ID NO: 38281 - protein, 409 aa, Homo sapiens
  REGION 1..409: note = ENSP00000330485
MTQKGSMKPVKKKKTEEPELEPLCCCEYIDRNGEKNHVATCLCDCQDLDEGCDRWITCKSLQPETCERIMDTISDRLRIPWLRGAKKVNISIIPPLVLLPVFLHVASWHFLLGVVVLTSLPVLALWYYYLTHRRKEQTLFFLSLGLFSLGYMYYVFLQEVVPKGRVGPVQLAVLTCGLFLILLALHRAKKNPGYLSNPASGDRSLSSSQLECLSRKGQEKTKGFPGADMSGSLNNRTTKDDPKGSSKMPAGSPTKAKEDWCAKCQLVRPARAWHCRICGICVRRMDHHCVWINSCVGESNHQAFILALLIFLLTSVYGITLTLDTICRDRSVFTALFYCPGVYANYSSALSFTCVWYSVIITAGMAYIFLIQLINISYNVTEREVQQALRQKTGRRLLCGLIVDTGLLG

SEQ ID NO: 38282 - protein, 403 aa, Homo sapiens
  REGION 1..403: note = ENSP00000417840
MKPVKKKKTEEPELEPLCCCEYIDRNGEKNHVATCLCDCQDLDEGCDRWITCKSLQPETCERIMDTISDRLRIPWLRGAKKVNISIIPPLVLLPVFLHVASWHFLLGVVVLTSLPVLALWYYYLTHRRKEQTLFFLSLGLFSLGYMYYVFLQEVVPKGRVGPVQLAVLTCGLFLILLALHRAKKNPGYLSNPASGDRSLSSSQLECLSRKGQEKTKGFPGADMSGSLNNRTTKDDPKGSSKMPAGSPTKAKEDWCAKCQLVRPARAWHCRICGICVRRMDHHCVWINSCVGESNHQAFILALLIFLLTSVYGITLTLDTICRDRSVFTALFYCPGVYANYSSALSFTCVWYSVIITAGMAYIFLIQLINISYNVTEREVQQALRQKTGRRLLCGLIVDTGLLG

SEQ ID NO: 38283 - protein, 412 aa, Homo sapiens
  REGION 1..412: note = ENSP00000420251
MTQKGSMKPVKKKKTEEPELEPLCCCEYIDRNGEKNHVATCLCDCQDLDEGCDRWITCKSLQPETCERIMDTISDRLRIPWLRGAKKVNISIIPPLVLLPVFLHVASWHFLLGVVVLTSLPVLALWYYYLTHRRKEQTLFFLSLGLFSLGYMYYVFLQEVVPKGRVGPVQLAVLTCGLFLILLALHRAKKNPGYLSNPASGDRSLSSSQLECLSRKGQEKTKGFPGADMSGSLNNRTTKDDPKGSSKMPAGSPTKAKEDWCAKCQLVRPARAWHCRICGICVRRMDHHCVWINSCVGESNHQAFILALLIFLLTSVYGITLTLDTICRDRSVFTALFYCPGVYANYSSALSFTCVWYSVIITAGMAYIFLIQLINISYNVTEREVQQALRQKTGRRLLCGLIVDTGKVLAHL

SEQ ID NO: 38284 - protein, 148 aa, Homo sapiens
  REGION 1..148: note = ENSP00000420292
MTQKGSMKPVKKKKTEEPELEPLCCCEYIDRNGEKNHVATCLCDCQDLDEGCDRWITCKSLQPETCERIMDTISDRLRIPWLRGAKKVNISIIPPLVLLPVFLHVASWHFLLGVVVLTSLPVLALWYYYLTHRRKEQTLFFLSLGLFS

SEQ ID NO: 38285 - protein, 236 aa, Homo sapiens
  REGION 1..236: note = ENSP00000492287
SGDRSLSSSQLECLSRKGQEKTKGFPGADMSGSLNNRTTKDDPKGSSKMPAGSPTKAKEDWCAKCQLVRPARAWHCRICGICVRRMDHHCVWINSCVGESNHQAFILALLIFLLTSVYGITLTLDTICRDRSVFTALFYCPGVYANYSSALSFTCVWYSVIITAGMAYIFLIQLINISYNVTEREVQQALRQKTGRRLLCGLIVDTGQYNRGFLRNWHQFSTLGTRAFHHPAEDIV

SEQ ID NO: 38286 - protein, 75 aa, Homo sapiens
  REGION 1..75: note = ENSP00000417579
YNVTEREVQQALRQKTGRRLLCGLIVDTDLSYSRTKYLIADIARGTFQVPGSLEEFQLPSYEVAVAFLLLLFPLS

SEQ ID NO: 38287 - protein, 70 aa, Homo sapiens
  REGION 1..70: note = ENSP00000492572
MSGLDDMTDSDSCLSRKKIKKTESGMYACDLCDKTFQKSSSLLRHKYEHTVYDSHASREEELSAWFWSGT

SEQ ID NO: 38288 - protein, 1102 aa, Homo sapiens
  REGION 1..1102: note = ENSP00000490673
MKEDYDTMGPEATIQTAINNGTVKNANCTSDFEEYFAKRKLEERDGHAVSIEEYLQRSDTAIIYPEAPEELSRLGTPEANGQEENDLPPGTPDAFAQLLTCPYCDRGYKRLTSLKEHIKYRHEKNEENFSCPLCSYTFAYRTQLERHMVTHKPGTDQHQMLTQGAGNRKFKCTECGKAFKYKHHLKEHLRIHSGEKPYECPNCKKRFSHSGSYSSHISSKKCIGLISVNGRMRNNIKTGSSPNSVSSSPTNSAITQLRNKLENGKPLSMSEQTGLLKIKTEPLDFNDYKVLMATHGFSGTSPFMNGGLGATSPLGVHPSAQSPMQHLGVGMEAPLLGFPTMNSNLSEVQKVLQIVDNTVSRQKMDCKAEEISKLKGYHMKDPCSQPEEQGVTSPNIPPVGLPVVSHNGATKSIIDYTLEKVNEAKACLQSLTTDSRRQISNIKKEKLRTLIDLVTDDKMIENHNISTPFSCQFCKESFPGPIPLHQHERYLCKMNEEIKAVLQPHENIVPNKAGVFVDNKALLLSSVLSEKGMTSPINPYKDHMSVLKAYYAMNMEPNSDELLKISIAVGLPQEFVKEWFEQRKVYQYSNSRSPSLERSSKPLAPNSNPPTKDSLLPRSPVKPMDSITSPSIAELHNSVTNCDPPLRLTKPSHFTNIKPVEKLDHSRSNTPSPLNLSSTSSKNSHSSSYTPNSFSSEELQAEPLDLSLPKQMKEPKSIIATKNKTKASSISLDHNSVSSSSENSDEPLNLTFIKKEFSNSNNLDNKSTNPVFSMNPFSAKPLYTALPPQSAFPPATFMPPVQTSIPGLRPYPGLDQMSFLPHMAYTYPTGAATFADMQQRRKYQRKQGFQGELLDGAQDYMSGLDDMTDSDSCLSRKKIKKTESGMYACDLCDKTFQKSSSLLRHKYEHTGKRPHQCQICKKAFKHKHHLIEHSRLHSGEKPYQCDKCGKRFSHSGSYSQHMNHRYSYCKREAEEREAAEREAREKGHLEPTELLMNRAYLQSITPQGYSDSEERESMPRDGESEKEHEKEGEDGYGKLGRQDGDEEFEEEEEESENKSMDTDPETIRDEEETGDHSMDDSSEDGKMETKSDHEEDNMEDGM

SEQ ID NO: 38289 - protein, 1102 aa, Homo sapiens; identical to SEQ ID NO: 38288
  REGION 1..1102: note = ENSP00000490723

SEQ ID NO: 38290 - protein, 1102 aa, Homo sapiens; identical to SEQ ID NO: 38288
  REGION 1..1102: note = ENSP00000490508

SEQ ID NO: 38291 - protein, 1102 aa, Homo sapiens; identical to SEQ ID NO: 38288
  REGION 1..1102: note = ENSP00000490141

SEQ ID NO: 38292 - protein, 1102 aa, Homo sapiens; identical to SEQ ID NO: 38288
  REGION 1..1102: note = ENSP00000490872

SEQ ID NO: 38293 - protein, 955 aa, Homo sapiens
  REGION 1..955: note = ENSP00000490934
MVTHKPGTDQHQMLTQGAGNRKFKCTECGKAFKYKHHLKEHLRIHSGEKPYECPNCKKRFSHSGSYSSHISSKKCIGLISVNGRMRNNIKTGSSPNSVSSSPTNSAITQLRNKLENGKPLSMSEQTGLLKIKTEPLDFNDYKVLMATHGFSGTSPFMNGGLGATSPLGVHPSAQSPMQHLGVGMEAPLLGFPTMNSNLSEVQKVLQIVDNTVSRQKMDCKAEEISKLKGYHMKDPCSQPEEQGVTSPNIPPVGLPVVSHNGATKSIIDYTLEKVNEAKACLQSLTTDSRRQISNIKKEKLRTLIDLVTDDKMIENHNISTPFSCQFCKESFPGPIPLHQHERYLCKMNEEIKAVLQPHENIVPNKAGVFVDNKALLLSSVLSEKGMTSPINPYKDHMSVLKAYYAMNMEPNSDELLKISIAVGLPQEFVKEWFEQRKVYQYSNSRSPSLERSSKPLAPNSNPPTKDSLLPRSPVKPMDSITSPSIAELHNSVTNCDPPLRLTKPSHFTNIKPVEKLDHSRSNTPSPLNLSSTSSKNSHSSSYTPNSFSSEELQAEPLDLSLPKQMKEPKSIIATKNKTKASSISLDHNSVSSSSENSDEPLNLTFIKKEFSNSNNLDNKSTNPVFSMNPFSAKPLYTALPPQSAFPPATFMPPVQTSIPGLRPYPGLDQMSFLPHMAYTYPTGAATFADMQQRRKYQRKQGFQGELLDGAQDYMSGLDDMTDSDSCLSRKKIKKTESGMYACDLCDKTFQKSSSLLRHKYEHTGKRPHQCQICKKAFKHKHHLIEHSRLHSGEKPYQCDKCGKRFSHSGSYSQHMNHRYSYCKREAEEREAAEREAREKGHLEPTELLMNRAYLQSITPQGYSDSEERESMPRDGESEKEHEKEGEDGYGKLGRQDGDEEFEEEEEESENKSMDTDPETIRDEEETGDHSMDDSSEDGKMETKSDHEEDNMEDGM

SEQ ID NO: 38294 - protein, 1239 aa, Homo sapiens
  REGION 1..1239: note = ENSP00000490317
MKQPIMADGPRCKRRKQANPRRKNVVNYDNVVDTGSETDEEDKLHIAEDDGIANPLDQETSPASVPNHESSPHVSQALLPREEEEDEIREGGVEHPWHNNEILQASVDGPEEMKEDYDTMGPEATIQTAINNGTVKNANCTSDFEEYFAKRKLEERDGHAVSIEEYLQRSDTAIIYPEAPEELSRLGTPEANGQEENDLPPGTPDAFAQLLTCPYCDRGYKRLTSLKEHIKYRHEKNEENFSCPLCSYTFAYRTQLERHMVTHKPGTDQHQMLTQGAGNRKFKCTECGKAFKYKHHLKEHLRIHSDSSLGRQLQLLSNQGNVTVILIIILGEKPYECPNCKKRFSHSGSYSSHISSKKCIGLISVNGRMRNNIKTGSSPNSVSSSPTNSAITQLRNKLENGKPLSMSEQTGLLKIKTEPLDFNDYKVLMATHGFSGTSPFMNGGLGATSPLGVHPSAQSPMQHLGVGMEAPLLGFPTMNSNLSEVQKVLQIVDNTVSRQKMDCKAEEISKLKGYHMKDPCSQPEEQGVTSPNIPPVGLPVVSHNGATKSIIDYTLEKVNEAKACLQSLTTDSRRQISNIKKEKLRTLIDLVTDDKMIENHNISTPFSCQFCKESFPGPIPLHQHERYLCKMNEEIKAVLQPHENIVPNKAGVFVDNKALLLSSVLSEKGMTSPINPYKDHMSVLKAYYAMNMEPNSDELLKISIAVGLPQEFVKEWFEQRKVYQYSNSRSPSLERSSKPLAPNSNPPTKDSLLPRSPVKPMDSITSPSIAELHNSVTNCDPPLRLTKPSHFTNIKPVEKLDHSRSNTPSPLNLSSTSSKNSHSSSYTPNSFSSEELQAEPLDLSLPKQMKEPKSIIATKNKTKASSISLDHNSVSSSSENSDEPLNLTFIKKEFSNSNNLDNKSTNPVFSMNPFSAKPLYTALPPQSAFPPATFMPPVQTSIPGLRPYPGLDQMSFLPHMAYTYPTGAATFADMQQRRKYQRKQGFQGELLDGAQDYMSGLDDMTDSDSCLSRKKIKKTESGMYACDLCDKTFQKSSSLLRHKYEHTGKRPHQCQICKKAFKHKHHLIEHSRLHSGEKPYQCDKCGKRFSHSGSYSQHMNHRYSYCKREAEEREAAEREAREKGHLEPTELLMNRAYLQSITPQGYSDSEERESMPRDGESEKEHEKEGEDGYGKLGRQDGDEEFEEEEEESENKSMDTDPETIRDEEETGDHSMDDSSEDGKMETKSDHEEDNMEDGM

SEQ ID NO: 38295 - protein, 1214 aa, Homo sapiens
  REGION 1..1214: note = ENSP00000487174
MKQPIMADGPRCKRRKQANPRRKNVVNYDNVVDTGSETDEEDKLHIAEDDGIANPLDQETSPASVPNHESSPHVSQALLPREEEEDEIREGGVEHPWHNNEILQASVDGPEEMKEDYDTMGPEATIQTAINNGTVKNANCTSDFEEYFAKRKLEERDGHAVSIEEYLQRSDTAIIYPEAPEELSRLGTPEANGQEENDLPPGTPDAFAQLLTCPYCDRGYKRLTSLKEHIKYRHEKNEENFSCPLCSYTFAYRTQLERHMVTHKPGTDQHQMLTQGAGNRKFKCTECGKAFKYKHHLKEHLRIHSGEKPYECPNCKKRFSHSGSYSSHISSKKCIGLISVNGRMRNNIKTGSSPNSVSSSPTNSAITQLRNKLENGKPLSMSEQTGLLKIKTEPLDFNDYKVLMATHGFSGTSPFMNGGLGATSPLGVHPSAQSPMQHLGVGMEAPLLGFPTMNSNLSEVQKVLQIVDNTVSRQKMDCKAEEISKLKGYHMKDPCSQPEEQGVTSPNIPPVGLPVVSHNGATKSIIDYTLEKVNEAKACLQSLTTDSRRQISNIKKEKLRTLIDLVTDDKMIENHNISTPFSCQFCKESFPGPIPLHQHERYLCKMNEEIKAVLQPHENIVPNKAGVFVDNKALLLSSVLSEKGMTSPINPYKDHMSVLKAYYAMNMEPNSDELLKISIAVGLPQEFVKEWFEQRKVYQYSNSRSPSLERSSKPLAPNSNPPTKDSLLPRSPVKPMDSITSPSIAELHNSVTNCDPPLRLTKPSHFTNIKPVEKLDHSRSNTPSPLNLSSTSSKNSHSSSYTPNSFSSEELQAEPLDLSLPKQMKEPKSIIATKNKTKASSISLDHNSVSSSSENSDEPLNLTFIKKEFSNSNNLDNKSTNPVFSMNPFSAKPLYTALPPQSAFPPATFMPPVQTSIPGLRPYPGLDQMSFLPHMAYTYPTGAATFADMQQRRKYQRKQGFQGELLDGAQDYMSGLDDMTDSDSCLSRKKIKKTESGMYACDLCDKTFQKSSSLLRHKYEHTGKRPHQCQICKKAFKHKHHLIEHSRLHSGEKPYQCDKCGKRFSHSGSYSQHMNHRYSYCKREAEEREAAEREAREKGHLEPTELLMNRAYLQSITPQGYSDSEERESMPRDGESEKEHEKEGEDGYGKLGRQDGDEEFEEEEEESENKSMDTDPETIRDEEETGDHSMDDSSEDGKMETKSDHEEDNMEDGM

SEQ ID NO: 38296 - protein, 220 aa, Homo sapiens
  REGION 1..220: note = ENSP00000394777
MKQPIMADGPRCKRRKQANPRRKNVVNYDNVVDTGSETDEEDKLHIAEDDGIANPLDQETSPASVPNHESSPHVSQALLPREEEEDEIREGGVEHPWHNNEILQASVDGPDLPPGTPDAFAQLLTCPYCDRGYKRLTSLKEHIKYRHEKNEENFSCPLCSYTFAYRTQLERHMVTHKPGTDQHQMLTQGAGNRKFKCTECGKAFKYKHHLKEHLRIHSGT

SEQ ID NO: 38297 - protein, 1214 aa, Homo sapiens; identical to SEQ ID NO: 38295
  REGION 1..1214: note = ENSP00000386854

SEQ ID NO: 38298 - protein, 122 aa, Homo sapiens
  REGION 1..122: note = ENSP00000490175
MKQPIMADGPRCKRRKQANPRRKNVVNYDNVVDTGSETDEEDKLHIAEDDGIANPLDQETSPASVPNHESSPHVSQALLPREEEEDEIREGGVEHPWHNNEILQASVDGPESSLFLCLACLV

SEQ ID NO: 38299 - protein, 1202 aa, Homo sapiens
  REGION 1..1202: note = ENSP00000490776
MKQPIMADGPRCKRRKQANPRRKNVVNYDNVVDTGSETDEEDKLHIAEDDGIANPLDQETSPASVPNHESSPHVSQALLPREEEEDEIREGGVEHPWHNNEILQASVDGPEEMKEDYDTMGPEATIQTAINNGTVKNANCTSDFEEYFAKRKLEERDGHAVSIEEYLQRSDTAIIYPEAPEELSRLGTPEANGQEENDLPPGTPDAFAQLLTCPYCDRGYKRLTSLKEHIKYRHEKNEENFSCPLCSYTFAYRTQLERHMVTHKPGTDQHQMLTQGAGNRKFKCTECGKAFKYKHHLKEHLRIHSGEKPYECPNCKKRFSHSGSYSSHISSKKCIGLISVNGRMRNNIKTGSSPNSVSSSPTNSAITQLRNKLENGKPLSMSEQTGLLKIKTEPLDFNDYKVLMATHGFSGTSPFMNGGLGATSPLGVHPSAQSPMQHLGVGMEAPLLGFPTMNSNLSEVQKVLQIVDNTVSRQKMDCKAEEISKLKGYHMKDPCSQPEEQGVTSPNIPPVGLPVVSHNGATKSIIDYTLEKVNEAKACLQSLTTDSRRQISNIKKEKLRTLIDLVTDDKMIENHNISTPFSCQFCKESFPGPIPLHQHERYLCKMNEEIKAVLQPHENIVPNKAGVFVDNKALLLSSVLSEKGMTSPINPYKDHMSVLKAYYAMNMEPNSDELLKISIAVGLPQEFVKEWFEQRKVYQYSNSRSPSLERSSKPLAPNSNPPTKDSLLPRSPVKPMDSITSPSIAELHNSVTNCDPPLRLTKPSHFTNIKPVEKLDHSRSNTPSPLNLSSTSSKNSHSSSYTPNSFSSEELQAEPLDLSLPKQMKEPKSIIATKNKTKASSISLDHNSVSSSSENSDEPLNLTFIKKEFSNSNNLDNKSTNPVFSMNPFSAKPLYTALPPQSAFPPATFMPPVQTSIPGLRPYPGLDQMSFLPHMAYTYPTGAATFADMQQRRKYQRKQGFQGELLDGAQDYMSGLDDMTDSDSCLSRKKIKKTESGMYACDLCDKTFQKSSSLLRHKYEHTGKRPHQCQICKKAFKHKHHLIEHSRLHSGEKPYQCDKCGKRFSHSGSYSQHMNHRALPLRGTLTRRRGRVCRGMARARRSTRKKARMATGSWADRMATRSSRRKRKKVKIKVWIRIPKRYEMKKRLEITPWTIVRRMGKWKPNQTTRKTIWKMACNKLLHFKLPIFFSSSIVTCLKTLLC

SEQ ID NO: 38300 - protein, 1190 aa, Homo sapiens
  REGION 1..1190: note = ENSP00000443792
MKQPIMADGPRCKRRKQANPRRKNVVNYDNVVDTGSETDEEDKLHIAEDDGIANPLDQETSPASVPNHESSPHVSQALLPREEEEDEIREGGVEHPWHNNEILQASVDGPVKNANCTSDFEEYFAKRKLEERDGHAVSIEEYLQRSDTAIIYPEAPEELSRLGTPEANGQEENDLPPGTPDAFAQLLTCPYCDRGYKRLTSLKEHIKYRHEKNEENFSCPLCSYTFAYRTQLERHMVTHKPGTDQHQMLTQGAGNRKFKCTECGKAFKYKHHLKEHLRIHSGEKPYECPNCKKRFSHSGSYSSHISSKKCIGLISVNGRMRNNIKTGSSPNSVSSSPTNSAITQLRNKLENGKPLSMSEQTGLLKIKTEPLDFNDYKVLMATHGFSGTSPFMNGGLGATSPLGVHPSAQSPMQHLGVGMEAPLLGFPTMNSNLSEVQKVLQIVDNTVSRQKMDCKAEEISKLKGYHMKDPCSQPEEQGVTSPNIPPVGLPVVSHNGATKSIIDYTLEKVNEAKACLQSLTTDSRRQISNIKKEKLRTLIDLVTDDKMIENHNISTPFSCQFCKESFPGPIPLHQHERYLCKMNEEIKAVLQPHENIVPNKAGVFVDNKALLLSSVLSEKGMTSPINPYKDHMSVLKAYYAMNMEPNSDELLKISIAVGLPQEFVKEWFEQRKVYQYSNSRSPSLERSSKPLAPNSNPPTKDSLLPRSPVKPMDSITSPSIAELHNSVTNCDPPLRLTKPSHFTNIKPVEKLDHSRSNTPSPLNLSSTSSKNSHSSSYTPNSFSSEELQAEPLDLSLPKQMKEPKSIIATKNKTKASSISLDHNSVSSSSENSDEPLNLTFIKKEFSNSNNLDNKSTNPVFSMNPFSAKPLYTALPPQSAFPPATFMPPVQTSIPGLRPYPGLDQMSFLPHMAYTYPTGAATFADMQQRRKYQRKQGFQGELLDGAQDYMSGLDDMTDSDSCLSRKKIKKTESGMYACDLCDKTFQKSSSLLRHKYEHTGKRPHQCQICKKAFKHKHHLIEHSRLHSGEKPYQCDKCGKRFSHSGSYSQHMNHRYSYCKREAEEREAAEREAREKGHLEPTELLMNRAYLQSITPQGYSDSEERESMPRDGESEKEHEKEGEDGYGKLGRQDGDEEFEEEEEESENKSMDTDPETIRDEEETGDHSMDDSSEDGKMETKSDHEEDNMEDGM

SEQ ID NO: 38301 - protein, 1214 aa, Homo sapiens; identical to SEQ ID NO: 38295
  REGION 1..1214: note = ENSP00000454157

SEQ ID NO: 38302 - protein, 1213 aa, Homo sapiens
  REGION 1..1213: note = ENSP00000302501
MKQPIMADGPRCKRRKQANPRRKNVVNYDNVVDTGSETDEEDKLHIAEDDGIANPLDQETSPASVPNHESSPHVSQALLPREEEEDEIREGGVEHPWHNNEILQASVDGPEMKEDYDTMGPEATIQTAINNGTVKNANCTSDFEEYFAKRKLEERDGHAVSIEEYLQRSDTAIIYPEAPEELSRLGTPEANGQEENDLPPGTPDAFAQLLTCPYCDRGYKRLTSLKEHIKYRHEKNEENFSCPLCSYTFAYRTQLERHMVTHKPGTDQHQMLTQGAGNRKFKCTECGKAFKYKHHLKEHLRIHSGEKPYECPNCKKRFSHSGSYSSHISSKKCIGLISVNGRMRNNIKTGSSPNSVSSSPTNSAITQLRNKLENGKPLSMSEQTGLLKIKTEPLDFNDYKVLMATHGFSGTSPFMNGGLGATSPLGVHPSAQSPMQHLGVGMEAPLLGFPTMNSNLSEVQKVLQIVDNTVSRQKMDCKAEEISKLKGYHMKDPCSQPEEQGVTSPNIPPVGLPVVSHNGATKSIIDYTLEKVNEAKACLQSLTTDSRRQISNIKKEKLRTLIDLVTDDKMIENHNISTPFSCQFCKESFPGPIPLHQHERYLCKMNEEIKAVLQPHENIVPNKAGVFVDNKALLLSSVLSEKGMTSPINPYKDHMSVLKAYYAMNMEPNSDELLKISIAVGLPQEFVKEWFEQRKVYQYSNSRSPSLERSSKPLAPNSNPPTKDSLLPRSPVKPMDSITSPSIAELHNSVTNCDPPLRLTKPSHFTNIKPVEKLDHSRSNTPSPLNLSSTSSKNSHSSSYTPNSFSSEELQAEPLDLSLPKQMKEPKSIIATKNKTKASSISLDHNSVSSSSENSDEPLNLTFIKKEFSNSNNLDNKSTNPVFSMNPFSAKPLYTALPPQSAFPPATFMPPVQTSIPGLRPYPGLDQMSFLPHMAYTYPTGAATFADMQQRRKYQRKQGFQGELLDGAQDYMSGLDDMTDSDSCLSRKKIKKTESGMYACDLCDKTFQKSSSLLRHKYEHTGKRPHQCQICKKAFKHKHHLIEHSRLHSGEKPYQCDKCGKRFSHSGSYSQHMNHRYSYCKREAEEREAAEREAREKGHLEPTELLMNRAYLQSITPQGYSDSEERESMPRDGESEKEHEKEGEDGYGKLGRQDGDEEFEEEEEESENKSMDTDPETIRDEEETGDHSMDDSSEDGKMETKSDHEEDNMEDGM

SEQ ID NO: 38303 - protein, 21 aa, Homo sapiens
  REGION 1..21: note = ENSP00000489701
  VARIANT 1: note = Any amino acid
XTFQKSSSLLRHKYEHTDSYD

SEQ ID NO: 38304 - protein, 731 aa, Homo sapiens
  REGION 1..731: note = ENSP00000395496
MTHFEDIEPACCRSRAPSPCELPSDPLLSMKQPIMADGPRCKRRKQANPRRKNVVNYDNVVDTGSETDEEDKLHIAEDDGIANPLDQETSPASVPNHESSPHVSQALLPREEEEDEIREGGVEHPWHNNEILQASVDGPEEMKEDYDTMGPEATIQTAINNGTVKNANCTSDFEEYFAKRKLEERDGHAVSIEEYLQRSDTAIIYPEAPEELSRLGTPEANGQEENDLPPGTPDAFAQLLTCPYCDRGYKRLTSLKEHIKYRHEKNEENFSCPLCSYTFAYRTQLERHMVTHKPGTDQHQMLTQGAGNRKFKCTECGKAFKYKHHLKEHLRIHSGEKPYECPNCKKRFSHSGSYSSHISSKKCIGLISVNGRMRNNIKTGSSPNSVSSSPTNSAITQLRNKLENGKPLSMSEQTGLLKIKTEPLDFNDYKVLMATHGFSGTSPFMNGGLGATSPLGVHPSAQSPMQHLGVGMEAPLLGFPTMNSNLSEVQKVLQIVDNTVSRQKMDCKAEEISKLKGYHMKDPCSQPEEQGVTSPNIPPVGLPVVSHNGATKSIIDYTLEKVNEAKACLQSLTTDSRRQISNIKKEKLRTLIDLVTDDKMIENHNISTPFSCQFCKESFPGPIPLHQHERYLCKMNEEIKAVLQPHENIVPNKAGVFVDNKALLLSSVLSEKGMTSPINPYKDHMSVLKAYYAMNMEPNSDELLKISIAVGLPQEFVKEWFEQRKVYQYSN

SEQ ID NO: 38305 - protein, 612 aa, Homo sapiens
  REGION 1..612: note = ENSP00000490293
MKQPIMADGPRCKRRKQANPRRKNVVNYDNVVDTGSETDEEDKLHIAEDDGIANPLDQETSPASVPNHESSPHVSQALLPREEEEDEIREGGVEHPWHNNEILQASVDGPEEMKEDYDTMGPEATIQTAINNGTVKNANCTSDFEEYFAKRKLEERDGHAVSIEEYLQRSDTAIIYPEAPEELSRLGTPEANGQEENDLPPGTPDAFAQLLTCPYCDRGYKRLTSLKEHIKYRHEKNEENFSCPLCSYTFAYRTQLERHMVTHKPGTDQHQMLTQGAGNRKFKCTECGKAFKYKHHLKEHLRIHSGEKPYECPNCKKRFSHSGSYSSHISSKKCIGLISVNGRMRNNIKTGSSPNSVSSSPTNSAITQLRNKLENGKPLSMSEQTGLLKIKTEPLDFNDYKVLMATHGFSGTSPFMNGGLGATSPLGVHPSAQSPMQHLGVGMEAPLLGFPTMNSNLSEVQKVLQIVDNTVSRQKMDCKAEEISKLKGYHMKDPCSQPEEQGVTSPNIPPVGLPVVSHNGATKSIIDYTLEKVNEAKACLQSLTTDSRRQISNIKKEKLRTLIDLVTDDKMIENHNISTPFSCQFCKESFPGPIPLHQHERYLCKMNEEIKA

SEQ ID NO: 38306 - protein, 467 aa, Homo sapiens
  REGION 1..467: note = ENSP00000376601
MCVSEIEPACCRSRAPSPCELPSDPLLSMKQPIMADGPRCKRRKQANPRRKNVVNYDNVVDTGSETDEEDKLHIAEDDGIANPLDQETSPASVPNHESSPHVSQALLPREEEEDEIREGGVEHPWHNNEILQASVDGPEEMKEDYDTMGPEATIQTAINNGTVKNANCTSDFEEYFAKRKLEERDGHAVSIEEYLQRSDTAIIYPEAPEELSRLGTPEANGQEENDLPPGTPDAFAQLLTCPYCDRGYKRLTSLKEHIKYRHEKNEENFSCPLCSYTFAYRTQLERHMVTHKPGTDQHQMLTQGAGNRKFKCTECGKAFKYKHHLKEHLRIHSGEKPYECPNCKKRFSHSGSYSSHISSKKCIGLISVNGRMRNNIKTGSSPNSVSSSPTNSAITQLRNKLENGKPLSMSEQTGLLKIKTEPLDFNDYKVLMATHGFSGTSPFMNGGLGATSPLGVHPSAQSPMQHL

SEQ ID NO: 38307 - protein, 184 aa, Homo sapiens
  REGION 1..184: note = ENSP00000475267
MKQPIMADGPRCKRRKQANPRRKNVVNYDNVVDTGSETDEEDKLHIAEDDGIANPLDQETSPASVPNHESSPHVSQALLPREEEEDEIREGGVEHPWHNNEILQASVDGPVKNANCTSDFEEYFAKRKLEERDGHAVSIEEYLQRSDTAIIYPEAPEELSRLGTPEANGQEENDLPPGTPDAFA

SEQ ID NO: 38308 - protein, 120 aa, Homo sapiens
  REGION 1..120: note = ENSP00000387256
MKQPIMADGPRCKRRKQANPRRKNVVNYDNVVDTGSETDEEDKLHIAEDDGIANPLDQETSPASVPNHESSPHVSQALLPREEEEDEIREGGVEHPWHNNEILQASVDGPVKNANCTSDF

SEQ ID NO: 38309 - protein, 141 aa, Homo sapiens
  REGION 1..141: note = ENSP00000487476
MKQPIMADGPRCKRRKQANPRRKNVVNYDNVVDTGSETDEEDKLHIAEDDGIANPLDQETSPASVPNHESSPHVSQALLPREEEEDEIREGGVEHPWHNNEILQASVDGPEEMKEDYDTMGPEATIQTAINNGTVKNANCT

SEQ ID NO: 38310 - protein, 41 aa, Homo sapiens
  REGION 1..41: note = ENSP00000487261
MKQPIMADGPRCKRRKQANPRRKNGSSRLSEKAWTTCLSQH

SEQ ID NO: 38311 - protein, 91 aa, Homo sapiens
  REGION 1..91: note = ENSP00000400993
MKQPIMADGPRCKRRKQANPRRKNVVNYDNVVDTGSETDEEDKLHIAEDDGIANPLDQETSPASVPNHESSPHVSQALLPREEEEDEIREG

SEQ ID NO: 38312 - protein, 63 aa, Homo sapiens
  REGION 1..63: note = ENSP00000399451
MKQPIMADGPRCKRRKQANPRRKNVVNYDNVVDTGSETDEEDKLHIAEDDGIANPLDQETSPA

SEQ ID NO: 38313 - protein, 39 aa, Homo sapiens
  REGION 1..39: note = ENSP00000486346
MKQPIMADGPRCKRRKQANPRRKNVVNYDNVVDTGSETD

SEQ ID NO: 38314 - protein, 41 aa, Homo sapiens
  REGION 1..41: note = ENSP00000486341
MKQPIMADGPRCKRRKQANPRRKNAKTNHLNREINSTSVQH

SEQ ID NO: 38315 - protein, 58 aa, Homo sapiens
  REGION 1..58: note = ENSP00000475502
MKQPIMADGPRCKRRKQANPRRKNALESEMSTRSGRCPAAACHRCGPFVTCKVCCFCP

SEQ ID NO: 38316 - protein, 87 aa, Homo sapiens
  REGION 1..87: note = ENSP00000475329
MTHFEDIEPACCRSRAPSPCELPSDPLLSMKQPIMADGPRCKRRKQANPRRKNALESEMSTRSGRCPAAACHRCGPFVTCKVCCFCP

SEQ ID NO: 38317 - protein, 58 aa, Homo sapiens; identical to SEQ ID NO: 38315
  REGION 1..58: note = ENSP00000486240

SEQ ID NO: 38318 - protein, 36 aa, Homo sapiens
  REGION 1..36: note = ENSP00000490851
MKQPIMADGPRCKRRKQANPRRKNVSTWSGGARYPG

SEQ ID NO: 38319 - protein, 58 aa, Homo sapiens; identical to SEQ ID NO: 38315
  REGION 1..58: note = ENSP00000475400

SEQ ID NO: 38320 - protein, 423 aa, Homo sapiens
  REGION 1..423: note = ENSP00000475553
MADGPRCKRRKQANPRRKNVVNYDNVVDTGSETDEEDKLHIAEDDGIANPLDQETSPASVPNHESSPHVSQALLPREEEEDEIREGGVEHPWHNNEILQASVDGPEEMKEDYDTMGPEATIQTAINNGTVKNANCTSDFEEYFAKRKLEERDGHAVSIEEYLQRSDTAIIYPEAPEELSRLGTPEANGQEENDLPPGTPDAFAQLLTCPYCDRGYKRLTSLKEHIKYRHEKNEENFSCPLCSYTFAYRTQLERHMVTHKPGTDQHQMLTQGAGNRKFKCTECGKAFKYKHHLKEHLRIHSGEKPYECPNCKKRFSHSGSYSSHISSKKCIGLISVNGRMRNNIKTGSSPNSVSSSPTNSAITQLRNKLENGKPLSMSEQTGLLKNSRRQWLMPVIPALWEANEGGSGQEFETSLANMVKHHLS

SEQ ID NO: 38321 - protein, 180 aa, Homo sapiens
  REGION 1..180: note = ENSP00000386031
MEFPDLGKHCSEKTCKQLDFLPVKCDACKQDFCKDHFPYAAHKCPFAFQKDVHVPVCPLCNTPIPVKKGQIPDVVVGDHIDRDCDSHPGKKKEKIFTYRCSKEGCKKKEMLQMVCAQCHGNFCIQHRHPLDHSCRHGSRPTIKAGCSPMTVSESRPLGDFLTLAPGGLAQRLGYWFTRLM

SEQ ID NO: 38322 - protein, 205 aa, Homo sapiens
  REGION 1..205: note = ENSP00000380273
MEFPDLGKHCSEKTCKQLDFLPVKCDACKQDFCKDHFPYAAHKCPFAFQKDVHVPVCPLCNTPIPVKKGQIPDVVVGDHIDRDCDSHPGKKKEKSLCSLRFLHTVAQKRAARRKRCCRWYVPNVTATSVSSTDTLWTTAADTGVAPPSKLGEKRLRCDGSEHAVACVEAAYTLVGSGAPLSTIPHWLLILFVEGDGTIIKLNAEV

SEQ ID NO: 38323 - protein, 145 aa, Homo sapiens
  REGION 1..145: note = ENSP00000314619
MEFPDLGKHCSEKTCKQLDFLPVKCDACKQDFCKDHFPYAAHKCPFAFQKDVHVPVCPLCNTPIPVKKGQIPDVVVGDHIDRDCDSHPGKKKEKIFTYRCSKEGCKKKEMLQMVCAQCHGNFCIQHRHPLDHSCRHGSRPTIKAG

SEQ ID NO: 38324 - protein, 90 aa, Homo sapiens
  REGION 1..90: note = ENSP00000459173
  VARIANT 1: note = Any amino acid
XDACKQDFCKDHFPYAAHKCPFAFQKDVHVPVCPLCNTPIPVKKGQIPDVVVGDHIDRDCDSHPGKKKEKHRHPLDHSCRHGSRPTIKAG

SEQ ID NO: 38325 - protein, 213 aa, Homo sapiens
  REGION 1..213: note = ENSP00000366161
MAQETNQTPGPMLCSTGCGFYGNPRTNGMCSVCYKEHLQRQQNSGRMSPMGTASGSNSPTSDSASVQRADTSLNNCEGAAGSTSEKSRNVPVAALPVTQQMTEMSISREDKITTPKTEVSEPVVTQPSPSVSQPSTSQSEEKAPELPKPKKNRCFMCRKKVGLTGFDCRCGNLFCGLHRYSDKHNCPYDYKAEAAAKIRKENPVVVAEKIQRI

SEQ ID NO: 38326 - protein, 213 aa, Homo sapiens; identical to SEQ ID NO: 38325
  REGION 1..213: note = ENSP00000366159

SEQ ID NO: 38327 - protein, 213 aa, Homo sapiens; identical to SEQ ID NO: 38325
  REGION 1..213: note = ENSP00000350586

SEQ ID NO: 38328 - protein, 211 aa, Homo sapiens
  REGION 1..211: note = ENSP00000366155
MAKPEQAADGGVRGRGARPPAQEAQRRRRHPVVVARDLAPGVPGSLHSTQKNMAQETNQTPGPMLCSTGCGFYGNPRTNGMCSVCYKEHLQRQQNSGRMSPMGTASGSNSPTSDSASVQRADTSLNNCEGAAGSTSEKSRNVPVAALPVTQQMTEMSISREDKITTPKTEVSEPVVTQPSPSVSQPSTSQSEEKAPELPKPKKNRCFMCRK

SEQ ID NO: 38329 - protein, 213 aa, Homo sapiens; identical to SEQ ID NO: 38325
  REGION 1..213: note = ENSP00000237937

SEQ ID NO: 38330 - protein, 208 aa, Homo sapiens
  REGION 1..208: note = ENSP00000261749
MAQETNHSQVPMLCSTGCGFYGNPRTNGMCSVCYKEHLQRQNSSNGRISPPATSVSSLSESLPVQCTDGSVPEAQSALDSTSSSMQPSPVSNQSLLSESVASSQLDSTSVDKAVPETEDVQASVSDTAQQPSEEQSKSLEKPKQKKNRCFMCRKKVGLTGFECRCGNVYCGVHRYSDVHNCSYNYKADAAEKIRKENPVVVGEKIQKI

SEQ ID NO: 38331 - protein, 208 aa, Homo sapiens; identical to SEQ ID NO: 38330
  REGION 1..208: note = ENSP00000452735

SEQ ID NO: 38332 - protein, 196 aa, Homo sapiens
  REGION 1..196: note = ENSP00000454152
MAQETNHSQVPMLCSTGCGFYGNPRTNGMCSVCYKEHLQRQNSSNGRISPPVQCTDGSVPEAQSALDSTSSSMQPSPVSNQSLLSESVASSQLDSTSVDKAVPETEDVQASVSDTAQQPSEEQSKSLEKPKQKKNRCFMCRKKVGLTGFECRCGNVYCGVHRYSDVHNCSYNYKADAAEKIRKENPVVVGEKIQKI

SEQ ID NO: 38333 - protein, 72 aa, Homo sapiens
  REGION 1..72: note = ENSP00000453590
MSIRSFLESIFRCKQYSGLLLEIQRLRTRNYCMQQETLISSTYAKLGVQLRNMAQETNHSQVPMLCSTGCGF

SEQ ID NO: 38334 - protein, 148 aa, Homo sapiens
  REGION 1..148: note = ENSP00000454273
MAQETNHSQVPMLCSTGCGFYGNPRTNGMCSVCYKEHLQRQNSSNGRISPPATSVSSLSESLPVQCTDGSVPEAQSALDSTSSSMQPSPVSNQSLLSESVASSQLDSTSVDKAVPETEDVQGFECRCGNVYCGVHRYSDVHNCSYNYK

SEQ ID NO: 38335 - protein, 208 aa, Homo sapiens; identical to SEQ ID NO: 38330
  REGION 1..208: note = ENSP00000454137

SEQ ID NO: 38336 - protein, 20 aa, Homo sapiens
  REGION 1..20: note = ENSP00000455515
MAQETNHSQVPMLCSTGCGF

SEQ ID NO: 38337 - protein, 32 aa, Homo sapiens
  REGION 1..32: note = ENSP00000454409
MAQETNHSQVPMLCSTGCGFYGNPRTNGMCSV

SEQ ID NO: 38338 - protein, 208 aa, Homo sapiens; identical to SEQ ID NO: 38330
  REGION 1..208: note = ENSP00000453291

SEQ ID NO: 38339 - protein, 208 aa, Homo sapiens; identical to SEQ ID NO: 38330
  REGION 1..208: note = ENSP00000453709

SEQ ID NO: 38340 - protein, 177 aa, Homo sapiens
  REGION 1..177: note = ENSP00000452664
MAQETNHSQVPMLCSTGCGFYGNPRTNGMCSVCYKEHLQRQNSSNGRISPPATSVSSLSESLPVQCTDGSVPEAQSALDSTSSSMQPSPVSNQSLLSESVASSQLDSTSVDKAVPETEDVQASVSDTAQQPSEEQSKSLEKPKQKKNRCFMCRKKVGLTGKDLNQMFKIKMMFYNNA

SEQ ID NO: 38341 - protein, 87 aa, Homo sapiens
  REGION 1..87: note = ENSP00000455146
MAQETNHSQVPMLCSTGCGFYGNPRTNGMCSVCYKEHLQRQNSSNGRISPPATSVSSLSESLPVQCTDGSVPEAQSALDSTSSSMQP

SEQ ID NO: 38342 - protein, 155 aa, Homo sapiens
  REGION 1..155: note = ENSP00000453710
MKGFIFLKAIGVQLRNMAQETNHSQVPMLCSTGCGFYGNPRTNGMCSVCYKEHLQRQNSSNGRISPPATSVSSLSESLPVQCTDGSVPEAQSALDSTSSSMQPSPVSNQSLLSESVASSQLDSTSVDKAVPETEDVQASVSDTAQQPSEEQSKSL

SEQ ID NO: 38343 - protein, 64 aa, Homo sapiens
  REGION 1..64: note = ENSP00000456973
MAQETNHSQVPMLCSTGCGFYGNPRTNGMCSVCYKEHLQRQNSSNGRISPPATSVSSLSESLPV

SEQ ID NO: 38344 - protein, 158 aa, Homo sapiens
  REGION 1..158: note = ENSP00000453308
MKGFIFLKAIGVQLRNMAQETNHSQVPMLCSTGCGFYGNPRTNGMCSVCYKEHLQRQNSSNGRISPPATSVSSLSESLPVQCTDGSVPEAQSALDSTSSSMQPSPVSNQSLLSESVASSQLDSTSVDKAVPETEDVQASVSDTAQQPSEEQSKSLEKP

SEQ ID NO: 38345 - protein, 159 aa, Homo sapiens
  REGION 1..159: note = ENSP00000453571
MAQETNHSQVPMLCSTGCGFYGNPRTNGMCSVCYKEHLQRQNSSNGRISPPATSVSSLSESLPVQCTDGSVPEAQSALDSTSSSMQPSPVSNQSLLSESVASSQLDSTSVDKAVPETEDVQASVSDTAQQPSEEQSKSLEKPKQKKNRCFMCRKKVGLT

SEQ ID NO: 38346 - protein, 208 aa, Homo sapiens; identical to SEQ ID NO: 38330
  REGION 1..208: note = ENSP00000453888

SEQ ID NO: 38347 - protein, 174 aa, Homo sapiens
  REGION 1..174: note = ENSP00000452625
MLLLPNRDKGVQLRNMAQETNHSQVPMLCSTGCGFYGNPRTNGMCSVCYKEHLQRQNSSNGRISPPATSVSSLSESLPVQCTDGSVPEAQSALDSTSSSMQPSPVSNQSLLSESVASSQLDSTSVDKAVPETEDVQASVSDTAQQPSEEQSKSLEKPKQKKNRCFMCRKKVGLT

SEQ ID NO: 38348 - protein, 208 aa, Homo sapiens; identical to SEQ ID NO: 38330
  REGION 1..208: note = ENSP00000484971

SEQ ID NO: 38349 - protein, 208 aa, Homo sapiens; identical to SEQ ID NO: 38330
  REGION 1..208: note = ENSP00000478129

SEQ ID NO: 38350 - protein, 208 aa, Homo sapiens; identical to SEQ ID NO: 38330
  REGION 1..208: note = ENSP00000479071

SEQ ID NO: 38351 - protein, 3616 aa, Homo sapiens
  REGION 1..3616: note = ENSP00000430497
METCDSPPISRQENGQSTSKLCGTTQLDNEVPEKVAGMEPDRENSSTDDNLKTDERKSEALLGFSVENAAATQVTSAKEIPCNECATSFPSLQKYMEHHCPNARLPVLKDDNESEISELEDSDVENLTGEIVYQPDGSAYIIEDSKESGQNAQTGANSKLFSTAMFLDSLASAGEKSDQSASAPMSFYPQIINTFHIASSLGKPFTADQAFPNTSALAGVGPVLHSFRVYDLRHKREKDYLTSDGSAKNSCVSKDVPNNVDLSKFDGCVSDGKRKPVLMCFLCKLSFGYIRSFVTHAVHDHRMTLNDEEQKLLSNKCVSAIIQGIGKDKEPLISFLEPKKSTSVYPHFSTTNLIGPDPTFRGLWSAFHVENGDSLPAGFAFLKGSASTSSSAEQPLGITQMPKAEVNLGGLSSLVVNTPITSVSLSHSSSESSKMSESKDQENNCERPKESNVLHPNGECPVKSEPTEPGDEDEEDAYSNELDDEEVLGELTDSIGNKDFPLLNQSISPLSSSVLKFIEKGTSSSSATVSDDTEKKKQTAAVRASGSVASNYGISGKDFADASASKDSATAAHPSEIARGDEDSSATPHQHGFTPSTPGTPGPGGDGSPGSGIECPKCDTVLGSSRSLGGHMTMMHSRNSCKTLKCPKCNWHYKYQQTLEAHMKEKHPEPGGSCVYCKTGQPHPRLARGESYTCGYKPFRCEVCNYSTTTKGNLSIHMQSDKHLNNVQNLQNGNGEQVFGHSAPAPNTSLSGCGTPSPSKPKQKPTWRCEVCDYETNVARNLRIHMTSEKHMHNMMLLQQNMKQIQHNLHLGLAPAEAELYQYYLAQNIGLTGMKLENPADPQLMINPFQLDPATAAALAPGLVNNELPPEIRLASGQLMGDDLSLLTAGELSPYISDPALKLFQCAVCNKFTSDSLEALSVHVSSERSLPEEEWRAVIGDIYQCKLCNYNTQLKANFQLHCKTDKHMQKYQLVAHIKEGGKSNEWRLKCIAIGNPVHLKCNACDYYTNSVDKLRLHTTNHRHEAALKLYKHLQKQEGAVNPESCYYYCAVCDYTTKVKLNLVQHVRSVKHQQTEGLRKLQLHQQGLAPEEDNLSEIFFVKDCPPNELETASLGARTCDDDLTEQQLRSTSEEQSEEAEGAIKPTAVAEDDEKDTSERDNSEGKNSNKDSGIITPEKELKVSVAGGTQPLLLAKEEDVATKRSKPTEDNKFCHEQFYQCPYCNYNSRDQSRIQMHVLSQHSVQPVICCPLCQDVLSNKMHLQLHLTHLHSVSPDCVEKLLMTVPVPDVMMPNSMLLPAAASEKSERDTPAAVTAEGSGKYSGESPMDDKSMAGLEDSKANVEVKNEEQKPTKEPLEVSEWNKNSSKDVKIPDTLQDQLNEQQKRQPLSVSDRHVYKYRCNHCSLAFKTMQKLQIHSQYHAIRAATMCNLCQRSFRTFQALKKHLEAGHPELSEAELQQLYASLPVNGELWAESETMSQDDHGLEQEMEREYEVDHEGKASPVGSDSSSIPDDMGSEPKRTLPFRKGPNFTMEKFLDPSRPYKCTVCKESFTQKNILLVHYNSVSHLHKLKKVLQEASSPVPQETNSNTDNKPYKCSICNVAYSQSSTLEIHMRSVLHQTKARAAKLEPSGHVAGGHSIAANVNSPGQGMLDSMSLAAVNSKDTHLDAKELNKKQTPDLISAQPAHHPPQSPAQIQMQLQHELQQQAAFFQPQFLNPAFLPHFPMTPEALLQFQQPQFLFPFYIPGTEFSLGPDLGLPGSATFGMPGMTGMAGSLLEDLKQQIQTQHHVGQTQLQILQQQAQQYQATQPQLQPQKQQQQPPPPQQQQQQQASKLLKQEQSNIVSADCQIMKDVPSYKEAEDISEKPEKPKQEFISEGEGLKEGKDTKKQKSLEPSIPPPRIASGARGNAAKALLENFGFELVIQYNENRQKVQKKGKSGEGENTDKLECGTCGKLFSNVLILKSHQEHVHGQFFPYAALEKFARQYREAYDKLYPISPSSPETPPPPPPPPPLPPAPPQPSSMGPVKIPNTVSTPLQAPPPTPPPPPPPPPPPPPPPPPPPPSAPPQVQLPVSLDLPLFPSIMMQPVQHPALPPQLALQLPQMDALSADLTQLCQQQLGLDPNFLRHSQFKRPRTRITDDQLKILRAYFDINNSPSEEQIQEMAEKSGLSQKVIKHWFRNTLFKERQRNKDSPYNFSNPPITVLEDIRIDPQPTSLEHYKSDASFSKRSSRTRFTDYQLRVLQDFFDTNAYPKDDEIEQLSTVLNLPTRVIVVWFQNARQKARKSYENQAETKDNEKRELTNERYIRTSNMQYQCKKCNVVFPRIFDLITHQKKQCYKDEDDDAQDESQTEDSMDATDQVVYKHCTVSGQTDAAKNAAAPAASSGSGTSTPLIPSPKPEPEKTSPKPEYPAEKPKQSDPSPPSQGTKPALPLASTSSDPPQASTAQPQPQPQPPKQPQLIGRPPSASQTPVPSSPLQISMTSLQNSLPPQLLQYQCDQCTVAFPTLELWQEHQHMHFLAAQNQFLHSPFLERPMDMPYMIFDPNNPLMTGQLLGSSLTQMPPQASSSHTTAPTTVAASLKRKLDDKEDNNCSEKEGGNSGEDQHRDKRLRTTITPEQLEILYEKYLLDSNPTRKMLDHIAREVGLKKRVVQVWFQNTRARERKGQFRAVGPAQSHKRCPFCRALFKAKSALESHIRSRHWNEGKQAGYSLPPSPLISTEDGGESPQKYIYFDYPSLPLTKIDLSSENELASTVSTPVSKTAELSPKNLLSPSSFKAECSEDVENLNAPPAEAGYDQNKTDFDETSSINTAISDATTGDEGNTEMESTTGSSGDVKPALSPKEPKTLDTLPKPATTPTTEVCDDKFLFSLTSPSIHFNDKDGDHDQSFYITDDPDDNADRSETSSIADPSSPNPFGSSNPFKSKSNDRPGHKRFRTQMSNLQLKVLKACFSDYRTPTMQECEMLGNEIGLPKRVVQVWFQNARAKEKKFKINIGKPFMINQGGTEGTKPECTLCGVKYSARLSIRDHIFSKQHISKVRETVGSQLDREKDYLAPTTVRQLMAQQELDRIKKASDVLGLTVQQPGMMDSSSLHGISLPTAYPGLPGLPPVLLPGMNGPSSLPGFPQNSNTLTPPGAGMLGFPTSATSSPALSLSSAPTKPLLQTPPPPPPPPPPPPSSSLSGQQTEQQNKESEKKQTKPNKVKKIKEEELEATKPEKHPKKEEKISSALSVLGKVVGETHVDPIQLQALQNAIAGDPASFIGGQFLPYFIPGFASYFTPQLPGTVQGGYFPPVCGMESLFPYGPTMPQTLAGLSPGALLQQYQQYQQNLQESLQKQQKQQQEQQQKPVQAKTSKVESDQPQNSNDASETKEDKSTATESTKEEPQLESKSADFSDTYVVPFVKYEFICRKCQMMFTDEDAAVNHQKSFCYFGQPLIDPQETVLRVPVSKYQCLACDVAISGNEALSQHLQSSLHKEKTIKQAMRNAKEHVRLLPHSVCSPNPNTTSTSQSAASSNNTYPHLSCFSMKSWPNILFQASARRAASPPSSPPSLSLPSTVTSSLCSTSGVQTSLPTESCSDESDSELSQKLEDLDNSLEVKAKPASGLDGNFNSIRMDMFSV

SEQ ID NO: 38352 - protein, 155 aa, Homo sapiens
  REGION 1..155: note = ENSP00000428525
METCDSPPISRQENGQSTSKLCGTTQLDNEVPEKVAGMEPDRENSSTDDNLKTDERKSEALLGFSVENAAATQVTSAKEIPCNECATSFPSLQKYMEHHCPNARLPVLKDDNESEISELEDSDVENLTGEIVYQPDGSAYIIEDSKESGQNAQTG

SEQ ID NO: 38353 - protein, 101 aa, Homo sapiens
  REGION 1..101: note = ENSP00000429495
METCDSPPISRQENGQSTSKLCGTTQLDNEVPEKVAGMEPDRENSSTDDNLKTDERKSEALLGFSVENAAATQVTSAKEIPCNECATSFPSLQKYMEHHCP

SEQ ID NO: 38354 - protein, 155 aa, Homo sapiens; identical to SEQ ID NO: 38352
  REGION 1..155: note = ENSP00000427775

SEQ ID NO: 38355 - protein, 140 aa, Homo sapiens
  REGION 1..140: note = ENSP00000427739
METCDSPPISRQENGQSTSKLCGTTQLDNEVPEKVAGMEPDRENSSTDDNLKTDERKSEALLGFSVENAAATQVTSAKEIPCNECATSFPSLQKYMEHHCPNARLPVLKDDNESEISELEDSDVENLTGEIVYQPDGSAY

SEQ ID NO: 38356 - protein, 3590 aa, Homo sapiens
  REGION 1..3590: note = ENSP00000430848
METCDSPPISRQENGQSTSKLCGTTQLDNEVPEKVAGMEPDRENSSTDDNLKTDERKSEALLGFSVENAAATQVTSAKEIPCNECATSFPSLQKYMEHHCPNARLPVLKDDNESEISELEDSDVENLTGEIVYQPDGSAYIIEDSKESGQNAQTGANSKLFSTAMFLDSLASAGEKSDQSASAPMSFYPQIINTFHIASSLGKPFTADQAFPNTSALAGVGPVLHSFRVYDLRHKREKDYLTSDGSAKNSCVSKDVPNNVDLSKFDGCVSDGKRKPVLMCFLCKLSFGYIRSFVTHAVHDHRMTLNDEEQKLLSNKCVSAIIQGIGKDKEPLISFLEPKKSTSVYPHFSTTNLIGPDPTFRGLWSAFHVENGDSLPAGFAFLKGSASTSSSAEQPLGITQMPKAEVNLGGLSSLVVNTPITSVSLSHSSSESSKMSESKDQENNCERPKESNVLHPNGECPVKSEPTEPGDEDEEDAYSNELDDEEVLGELTDSIGNKDFPLLNQSISPLSSSVLKFIEKGTSSSSATVSDDTEKKKQTAAVRASGSVASNYGISGKDFADASASKDSATAAHPSEIARGDEDSSATPHQHGFTPSTPGTPGPGGDGSPGSGIECPKCDTVLGSSRSLGGHMTMMHSRNSCKTLKCPKCNWHYKYQQTLEAHMKEKHPEPGGSCVYCKTGQPHPRLARGESYTCGYKPFRCEVCNYSTTTKGNLSIHMQSDKHLNNVQNLQNGNGEQVFGHSAPAPNTSLSGCGTPSPSKPKQKPTWRCEVCDYETNVARNLRIHMTSEKHMHNMMLLQQNMKQIQHNLHLGLAPAEAELYQYYLAQNIGLTGMKLENPADPQLMINPFQLDPATAAALAPGLGELSPYISDPALKLFQCAVCNKFTSDSLEALSVHVSSERSLPEEEWRAVIGDIYQCKLCNYNTQLKANFQLHCKTDKHMQKYQLVAHIKEGGKSNEWRLKCIAIGNPVHLKCNACDYYTNSVDKLRLHTTNHRHEAALKLYKHLQKQEGAVNPESCYYYCAVCDYTTKVKLNLVQHVRSVKHQQTEGLRKLQLHQQGLAPEEDNLSEIFFVKDCPPNELETASLGARTCDDDLTEQQLRSTSEEQSEEAEGAIKPTAVAEDDEKDTSERDNSEGKNSNKDSGIITPEKELKVSVAGGTQPLLLAKEEDVATKRSKPTEDNKFCHEQFYQCPYCNYNSRDQSRIQMHVLSQHSVQPVICCPLCQDVLSNKMHLQLHLTHLHSVSPDCVEKLLMTVPVPDVMMPNSMLLPAAASEKSERDTPAAVTAEGSGKYSGESPMDDKSMAGLEDSKANVEVKNEEQKPTKEPLEVSEWNKNSSKDVKIPDTLQDQLNEQQKRQPLSVSDRHVYKYRCNHCSLAFKTMQKLQIHSQYHAIRAATMCNLCQRSFRTFQALKKHLEAGHPELSEAELQQLYASLPVNGELWAESETMSQDDHGLEQEMEREYEVDHEGKASPVGSDSSSIPDDMGSEPKRTLPFRKGPNFTMEKFLDPSRPYKCTVCKESFTQKNILLVHYNSVSHLHKLKKVLQEASSPVPQETNSNTDNKPYKCSICNVAYSQSSTLEIHMRSVLHQTKARAAKLEPSGHVAGGHSIAANVNSPGQGMLDSMSLAAVNSKDTHLDAKELNKKQTPDLISAQPAHHPPQSPAQIQMQLQHELQQQAAFFQPQFLNPAFLPHFPMTPEALLQFQQPQFLFPFYIPGTEFSLGPDLGLPGSATFGMPGMTGMAGSLLEDLKQQIQTQHHVGQTQLQILQQQAQQYQATQPQLQPQKQQQQPPPPQQQQQQQASKLLKQEQSNIVSADCQIMKDVPSYKEAEDISEKPEKPKQEFISEGEGLKEGKDTKKQKSLEPSIPPPRIASGARGNAAKALLENFGFELVIQYNENRQKVQKKGKSGEGENTDKLECGTCGKLFSNVLILKSHQEHVHGQFFPYAALEKFARQYREAYDKLYPISPSSPETPPPPPPPPPLPPAPPQPSSMGPVKIPNTVSTPLQAPPPTPPPPPPPPPPPPPPPPPPPPSAPPQVQLPVSLDLPLFPSIMMQPVQHPALPPQLALQLPQMDALSADLTQLCQQQLGLDPNFLRHSQFKRPRTRITDDQLKILRAYFDINNSPSEEQIQEMAEKSGLSQKVIKHWFRNTLFKERQRNKDSPYNFSNPPITVLEDIRIDPQPTSLEHYKSDASFSKRSSRTRFTDYQLRVLQDFFDTNAYPKDDEIEQLSTVLNLPTRVIVVWFQNARQKARKSYENQAETKDNEKRELTNERYIRTSNMQYQCKKCNVVFPRIFDLITHQKKQCYKDEDDDAQDESQTEDSMDATDQVVYKHCTVSGQTDAAKNAAAPAASSGSGTSTPLIPSPKPEPEKTSPKPEYPAEKPKQSDPSPPSQGTKPALPLASTSSDPPQASTAQPQPQPQPPKQPQLIGRPPSASQTPVPSSPLQISMTSLQNSLPPQLLQYQCDQCTVAFPTLELWQEHQHMHFLAAQNQFLHSPFLERPMDMPYMIFDPNNPLMTGQLLGSSLTQMPPQASSSHTTAPTTVAASLKRKLDDKEDNNCSEKEGGNSGEDQHRDKRLRTTITPEQLEILYEKYLLDSNPTRKMLDHIAREVGLKKRVVQVWFQNTRARERKGQFRAVGPAQSHKRCPFCRALFKAKSALESHIRSRHWNEGKQAGYSLPPSPLISTEDGGESPQKYIYFDYPSLPLTKIDLSSENELASTVSTPVSKTAELSPKNLLSPSSFKAECSEDVENLNAPPAEAGYDQNKTDFDETSSINTAISDATTGDEGNTEMESTTGSSGDVKPALSPKEPKTLDTLPKPATTPTTEVCDDKFLFSLTSPSIHFNDKDGDHDQSFYITDDPDDNADRSETSSIADPSSPNPFGSSNPFKSKSNDRPGHKRFRTQMSNLQLKVLKACFSDYRTPTMQECEMLGNEIGLPKRVVQVWFQNARAKEKKFKINIGKPFMINQGGTEGTKPECTLCGVKYSARLSIRDHIFSKQHISKVRETVGSQLDREKDYLAPTTVRQLMAQQELDRIKKASDVLGLTVQQPGMMDSSSLHGISLPTAYPGLPGLPPVLLPGMNGPSSLPGFPQNSNTLTPPGAGMLGFPTSATSSPALSLSSAPTKPLLQTPPPPPPPPPPPPSSSLSGQQTEQQNKESEKKQTKPNKVKKIKEEELEATKPEKHPKKEEKISSALSVLGKVVGETHVDPIQLQALQNAIAGDPASFIGGQFLPYFIPGFASYFTPQLPGTVQGGYFPPVCGMESLFPYGPTMPQTLAGLSPGALLQQYQQYQQNLQESLQKQQKQQQEQQQKPVQAKTSKVESDQPQNSNDASETKEDKSTATESTKEEPQLESKSADFSDTYVVPFVKYEFICRKCQMMFTDEDAAVNHQKSFCYFGQPLIDPQETVLRVPVSKYQCLACDVAISGNEALSQHLQSSLHKEKTIKQAMRNAKEHVRLLPHSVCSPNPNTTSTSQSAASSNNTYPHLSCFSMKSWPNILFQASARRAASPPSSPPSLSLPSTVTSSLCSTSGVQTSLPTESCSDESDSELSQKLEDLDNSLEVKAKPASGLDGNFNSIRMDMFSV

SEQ ID NO: 38357 - protein, 82 aa, Homo sapiens
  REGION 1..82: note = ENSP00000431101
  VARIANT 1: note = Any amino acid
XKVKLNLVQHVRSVKHQQTEGLRKLQLHQQGLAPEEDNLSEIFFVKDCPPNELETASLGARTCDDDLTEQQLRSTSAYLSTY

SEQ ID NO: 38358 - protein, 86 aa, Homo sapiens
  REGION 1..86: note = ENSP00000430375
  VARIANT 1: note = Any amino acid
XKLNLVQHVRSVKHQQTEGLRKLQLHQQGLAPEEDNLSEIFFVKDCPPNELASSCQIFWSACNFLCTEPNRLISSRRNCLIGSQDL

SEQ ID NO: 38359 - protein, 69 aa, Homo sapiens
  REGION 1..69: note = ENSP00000451093
MVREIIVENISSGNLGQRVLFSGITSLSPPTSDQAPNLLPTRKSKGSLKTCCQRKGTLLKEEVESLRPG

SEQ ID NO: 38360 - protein, 338 aa, Homo sapiens
  REGION 1..338: note = ENSP00000388402
MTTTLVSATIFDLSEVLCKGNKMLNYSAPSAGGCLLDRKAVGTPAGGGFPRRHSVTLPSSKFHQNQLLSSLKGEPAPALSSRDSRFRDRSFSEGGERLLPTQKQPGGGQVNSSRYKTELCRPFEENGACKYGDKCQFAHGIHELRSLTRHPKYKTELCRTFHTIGFCPYGPRCHFIHNAEERRALAGARDLSADRPRLQHSFSFAGFPSAAATAAATGLLDSPTSITPPPILSADDLLGSPTLPDGTNNPFAFSSQELASLFAPSMGLPGGGSPTTFLFRPMSESPHMFDSPPSPQDSLSDQEGYLSSSSSSHSGSDSPTLDNSRRLPIFSRLSISDD

SEQ ID NO: 38361 - protein, 338 aa, Homo sapiens; identical to SEQ ID NO: 38360
  REGION 1..338: note = ENSP00000337386

SEQ ID NO: 38362 - protein, 207 aa, Homo sapiens
  REGION 1..207: note = ENSP00000450784
MGRARKSGLGQRSRPTASRSEAAVQGNKMLNYSAPSAGGCLLDRKAVGTPAGGGFPRRHSVTLPSSKFHQNQLLSSLKGEPAPALSSRDSRFRDRSFSEGGERLLPTQKQPGGGQVNSSRYKTELCRPFEENGACKYGDKCQFAHGIHELRSLTRHPKYKTELCRTFHTIGFCPYGPRCHFIHNAEERRALAGARDLSADRPRLQHS

SEQ ID NO: 38363 - protein, 176 aa, Homo sapiens
  REGION 1..176: note = ENSP00000450600
MLNYSAPSAGGCLLDRKAVGTPAGGGFPRRHSVTLPSSKFHQNQLLSSLKGEPAPALSSRDSRFRDRSFSEGGERLLPTQKQPGGGQVNSSRYKTELCRPFEENGACKYGDKCQFAHGIHELRSLTRHPKYKTELCRTFHTIGFCPYGPRCHFIHNAEERRALAGARDLSADRPRL

SEQ ID NO: 38364 - protein, 189 aa, Homo sapiens
  REGION 1..189: note = ENSP00000452119
MGRARKSGLGQRSRPTASRSEAAVQPGVRKARGAGNWRVGLQTGEAAPSPHRDLRDTPDPRPWLARTHRMTTTLVSATIFDLSEVLCKGNKMLNYSAPSAGGCLLDRKAVGTPAGGGFPRRHSVTLPSSKFHQNQLLSSLKGEPAPALSSRDSRFRDRSFSEGGERLLPTQKQPGGGQVNSSRYKTELC

SEQ ID NO: 38365 - protein, 499 aa, Homo sapiens
  REGION 1..499: note = ENSP00000411514
MKRPLSPPPPAEKETPISGAAECLPRPPEPPKPKRERKRPSYTLCDVCNIQLNSAAQAQVHCGGRAHQRRLRQLSLGKSPSGPAGPASGAPSPLLASLPLPTRPLQPPLDFKHLLAFHFNGAAPLSLFPNFSTMDPVQKAVISHTFGVPSPLKKKLFISCNICHLRFNSANQAEAHYKGHKHARKLKAVEAAKSKQRPHTQAQDGAVVSPIPTLASGAPGEPQSKAVPAAPPLGPPLQPPPTPDPTCREPAHSELLDAASSSSSSSCPPCSPEPGREAPGPEPAAAAVGSSMSGEGRSEKGHLYCPTCKVTVNSASQLQAHNTGAKHRWMMEGQRGAPRRSRGRPVSRGGAGHKAKRVTGGRGGRQGPSPAFHCALCQLQVNSETQLKQHMSSRRHKDRLAGKTPKPSSQHSKLQKHAALASKLALQKQLTKTLAARFLPSPLPTAATAICALPGPLALRPAPTAATTLFPAPILGPALFRTPAGAVRPATGPIVLAPY

SEQ ID NO: 38366 - protein, 424 aa, Homo sapiens
  REGION 1..424: note = ENSP00000480744
MGLAAGPASGAPSPLLASLPLPTRPLQPPLDFKHLLAFHFNGAAPLSLFPNFSTMDPVQKAVISHTFGVPSPLKKKLFISCNICHLRFNSANQAEAHYKGHKHARKLKAVEAAKSKQRPHTQAQDGAVVSPIPTLASGAPGEPQSKVPAAPPLGPPLQPPPTPDPTCREPAHSELLDAASSSSSSSCPPCSPEPGREAPGPEPAAAAVGSSMSGEGRSEKGHLYCPTCKVTVNSASQLQAHNTGAKHRWMMEGQRGAPRRSRGRPVSRGGAGHKAKRVTGGRGGRQGPSPAFHCALCQLQVNSETQLKQHMSSRRHKDRLAGKTPKPSSQHSKLQKHAALAVSILKSKLALQKQLTKTLAARFLPSPLPTAATAICALPGPLALRPAPTAATTLFPAPILGPALFRTPAGAVRPATGPIVLAPY

SEQ ID NO: 38367 - protein, 513 aa, Homo sapiens
  REGION 1..513: note = ENSP00000340494
MASVLSRRLGKRSLLGARVLGPSASEGPSAAPPSEPLLEGAAPQPFTTSDDTPCQEQPKEVLKAPSTSGLQQVAFQPGQKVYVWYGGQECTGLVEQHSWMEGQVTVWLLEQKLQVCCRVEEVWLAELQGPCPQAPPLEPGAQALAYRPVSRNIDVPKRKSDAVEMDEMMAAMVLTSLSCSPVVQSPPGTEANFSASRAACDPWKESGDISDSGSSTTSGHWSGSSGVSTPSPPHPQASPKYLGDAFGSPQTDHGFETDPDPFLLDEPAPRKRKNSVKVMYKCLWPNCGKVLRSIVGIKRHVKALHLGDTVDSDQFKREEDFYYTEVQLKEESAAAAAAAAAGTPVPGTPTSEPAPTPSMTGLPLSALPPPLHKAQSSGPEHPGPESSLPSGALSKSAPGSFWHIQADHAYQALPSFQIPVSPHIYTSVSWAAAPSAACSLSPVRSRSLSFSEPQQPAPAMKSHLIVTSPPRAQSGARKARGEAKKCRKVYGIEHRDQWCTACRWKKACQRFLD

SEQ ID NO: 38368 - protein, 30 aa, Homo sapiens
  REGION 1..30: note = ENSP00000427719
LPSGALSKSAPGSFWHIQADHAYQESPRGG

SEQ ID NO: 38369 - protein, 513 aa, Homo sapiens; identical to SEQ ID NO: 38367
  REGION 1..513: note = ENSP00000429640

SEQ ID NO: 38370 - protein, 513 aa, Homo sapiens; identical to SEQ ID NO: 38367
  REGION 1..513: note = ENSP00000428452

SEQ ID NO: 38371 - protein, 187 aa, Homo sapiens
  REGION 1..187: note = ENSP00000427934
MASVLSRRLGKRSLLGARVLGPSASEGPSAAPPSEPLLEGAAPQPFTTSDDTPCQEQPKEVLKAPSTSGLQQVAFQPGQKVYVWYGGQECTGLVEQHSWMEGQVTVWLLEQKLQVCCRVEEVWLAELQGPCPQAPPLEPGAQALAYRPVSRNIDVPKRKSDAVEMDEMMAAMVLTSLSCSPVVQSPP

SEQ ID NO: 38372 - protein, 156 aa, Homo sapiens
  REGION 1..156: note = ENSP00000430203
MASVLSRRLGKRSLLGARVLGPSASEGPSAAPPSEPLLEGAAPQPFTTSDDTPCQEQPKEVLKAPSTSGLQQVAFQPGQKVYVWYGGQECTGLVEQHSWMEGQVTVWLLEQKLQVCCRVEEVWLAELQGPCPQAPPLEPGAQALAYRPVSRNIDVP

SEQ ID NO: 38373 - protein, 124 aa, Homo sapiens
  REGION 1..124: note = ENSP00000427812
MASVLSRRLGKRSLLGARVLGPSASEGPSAAPPSEPLLEGAAPQPFTTSDDTPCQEQPKEVLKAPSTSGLQQVAFQPGQKVYVWYGGQECTGLVEQHSWMEGQVTVWLLEQKLQVCCRVEEVWL

SEQ ID NO: 38374 - protein, 102 aa, Homo sapiens
  REGION 1..102: note = ENSP00000429823
MASVLSRRLGKRSLLGARVLGPSASEGPSAAPPSEPLLEGAAPQPFTTSDDTPCQEQPKEVLKAPSTSGLQQVAFQPGQKVYVWYGGQECTGLVEQHSWMEG

SEQ ID NO: 38375 - protein, 47 aa, Homo sapiens
  REGION 1..47: note = ENSP00000429649
MASVLSRRLGKRSLLGARVLGPSASEGPSAAPPSEPLLEGAAPQPFT

SEQ ID NO: 38376 - protein, 1284 aa, Homo sapiens
  REGION 1..1284: note = ENSP00000455426
MHKKRVEEGEASDFSLAWDSSVTAAGGLEGEPECDQKTSRALEDRNSVTSQEERNEDDEDMEDESIYTCDHCQQDFESLADLTDHRAHRCPGDGDDDPQLSWVASSPSSKDVASPTQMIGDGCDLGLGEEEGGTGLPYPCQFCDKSFIRLSYLKRHEQIHSDKLPFKCTYCSRLFKHKRSRDRHIKLHTGDKKYHCHECEAAFSRSDHLKIHLKTHSSSKPFKCTVCKRGFSSTSSLQSHMQAHKKNKEHLAKSEKEAKKDDFMCDYCEDTFSQTEELEKHVLTRHPQLSEKADLQCIHCPEVFVDENTLLAHIHQAHANQKHKCPMCPEQFSSVEGVYCHLDSHRQPDSSNHSVSPDPVLGSVASMSSATPDSSASVERGSTPDSTLKPLRGQKKMRDDGQGWTKVVYSCPYCSKRDFNSLAVLEIHLKTIHADKPQQSHTCQICLDSMPTLYNLNEHVRKLHKNHAYPVMQFGNISAFHCNYCPEMFADINSLQEHIRVSHCGPNANPSDGNNAFFCNQCSMGFLTESSLTEHIQQAHCSVGSAKLESPVVQPTQSFMEVYSCPYCTNSPIFGSILKLTKHIKENHKNIPLAHSKKSKAEQSPVSSDVEVSSPKRQRLSASANSISNGEYPCNQCDLKFSNFESFQTHLKLHLELLLRKQACPQCKEDFDSQESLLQHLTVHYMTTSTHYVCESCDKQFSSVDDLQKHLLDMHTFVLYHCTLCQEVFDSKVSIQVHLAVKHSNEKKMYRCTACNWDFRKEADLQVHVKHSHLGNPAKAHKCIFCGETFSTEVELQCHITTHSKKYNCKFCSKAFHAIILLEKHLREKHCVFDAATENGTANGVPPMATKKAEPADLQGMLLKNPEAPNSHEASEDDVDASEPMYGCDICGAAYTMEVLLQNHRLRDHNIRPGEDDGSRKKAEFIKGSHKCNVCSRTFFSENGLREHLQTHRGPAKHYMCPICGERFPSLLTLTEHKVTHSKSLDTGTCRICKMPLQSEEEFIEHCQMHPDLRNSLTGFRCVVCMQTVTSTLELKIHGTFHMQKLAGSSAASSPNGQGLQKLYKCALCLKEFRSKQDLVKLDVNGLPYGLCAGCMARSANGQVGGLAPPEPADRPCAGLRCPECSVKFESAEDLESHMQVDHRDLTPETSGPRKGTQTSPVPRKKTYQCIKCQMTFENEREIQIHVANHMIEEGINHECKLCNQMFDSPAKLLCHLIEHSFEGMGGTFKCPVCFTVFVQANKLQQHIFAVHGQEDKIYDCSQCPQKFFFQTELQNHTMSQHAQ

SEQ ID NO: 38377 - protein, 1224 aa, Homo sapiens
  REGION 1..1224: note = ENSP00000455588
MEDESIYTCDHCQQDFESLADLTDHRAHRCPGDGDDDPQLSWVASSPSSKDVASPTQMIGDGCDLGLGEEEGGTGLPYPCQFCDKSFIRLSYLKRHEQIHSDKLPFKCTYCSRLFKHKRSRDRHIKLHTGDKKYHCHECEAAFSRSDHLKIHLKTHSSSKPFKCTVCKRGFSSTSSLQSHMQAHKKNKEHLAKSEKEAKKDDFMCDYCEDTFSQTEELEKHVLTRHPQLSEKADLQCIHCPEVFVDENTLLAHIHQAHANQKHKCPMCPEQFSSVEGVYCHLDSHRQPDSSNHSVSPDPVLGSVASMSSATPDSSASVERGSTPDSTLKPLRGQKKMRDDGQGWTKVVYSCPYCSKRDFNSLAVLEIHLKTIHADKPQQSHTCQICLDSMPTLYNLNEHVRKLHKNHAYPVMQFGNISAFHCNYCPEMFADINSLQEHIRVSHCGPNANPSDGNNAFFCNQCSMGFLTESSLTEHIQQAHCSVGSAKLESPVVQPTQSFMEVYSCPYCTNSPIFGSILKLTKHIKENHKNIPLAHSKKSKAEQSPVSSDVEVSSPKRQRLSASANSISNGEYPCNQCDLKFSNFESFQTHLKLHLELLLRKQACPQCKEDFDSQESLLQHLTVHYMTTSTHYVCESCDKQFSSVDDLQKHLLDMHTFVLYHCTLCQEVFDSKVSIQVHLAVKHSNEKKMYRCTACNWDFRKEADLQVHVKHSHLGNPAKAHKCIFCGETFSTEVELQCHITTHSKKYNCKFCSKAFHAIILLEKHLREKHCVFDAATENGTANGVPPMATKKAEPADLQGMLLKNPEAPNSHEASEDDVDASEPMYGCDICGAAYTMEVLLQNHRLRDHNIRPGEDDGSRKKAEFIKGSHKCNVCSRTFFSENGLREHLQTHRGPAKHYMCPICGERFPSLLTLTEHKVTHSKSLDTGTCRICKMPLQSEEEFIEHCQMHPDLRNSLTGFRCVVCMQTVTSTLELKIHGTFHMQKLAGSSAASSPNGQGLQKLYKCALCLKEFRSKQDLVKLDVNGLPYGLCAGCMARSANGQVGGLAPPEPADRPCAGLRCPECSVKFESAEDLESHMQVDHRDLTPETSGPRKGTQTSPVPRKKTYQCIKCQMTFENEREIQIHVANHMIEEGINHECKLCNQMFDSPAKLLCHLIEHSFEGMGGTFKCPVCFTVFVQANKLQQHIFAVHGQEDKIYDCSQCPQKFFFQTELQNHTMSQHAQ

SEQ ID NO: 38378 - protein, 1224 aa, Homo sapiens; identical to SEQ ID NO: 38377
  REGION 1..1224: note = ENSP00000457928

SEQ ID NO: 38379 - protein, 1167 aa, Homo sapiens
  REGION 1..1167: note = ENSP00000442321
MIGDGCDLGLGEEEGGTGLPYPCQFCDKSFIRLSYLKRHEQIHSDKLPFKCTYCSRLFKHKRSRDRHIKLHTGDKKYHCHECEAAFSRSDHLKIHLKTHSSSKPFKCTVCKRGFSSTSSLQSHMQAHKKNKEHLAKSEKEAKKDDFMCDYCEDTFSQTEELEKHVLTRHPQLSEKADLQCIHCPEVFVDENTLLAHIHQAHANQKHKCPMCPEQFSSVEGVYCHLDSHRQPDSSNHSVSPDPVLGSVASMSSATPDSSASVERGSTPDSTLKPLRGQKKMRDDGQGWTKVVYSCPYCSKRDFNSLAVLEIHLKTIHADKPQQSHTCQICLDSMPTLYNLNEHVRKLHKNHAYPVMQFGNISAFHCNYCPEMFADINSLQEHIRVSHCGPNANPSDGNNAFFCNQCSMGFLTESSLTEHIQQAHCSVGSAKLESPVVQPTQSFMEVYSCPYCTNSPIFGSILKLTKHIKENHKNIPLAHSKKSKAEQSPVSSDVEVSSPKRQRLSASANSISNGEYPCNQCDLKFSNFESFQTHLKLHLELLLRKQACPQCKEDFDSQESLLQHLTVHYMTTSTHYVCESCDKQFSSVDDLQKHLLDMHTFVLYHCTLCQEVFDSKVSIQVHLAVKHSNEKKMYRCTACNWDFRKEADLQVHVKHSHLGNPAKAHKCIFCGETFSTEVELQCHITTHSKKYNCKFCSKAFHAIILLEKHLREKHCVFDAATENGTANGVPPMATKKAEPADLQGMLLKNPEAPNSHEASEDDVDASEPMYGCDICGAAYTMEVLLQNHRLRDHNIRPGEDDGSRKKAEFIKGSHKCNVCSRTFFSENGLREHLQTHRGPAKHYMCPICGERFPSLLTLTEHKVTHSKSLDTGTCRICKMPLQSEEEFIEHCQMHPDLRNSLTGFRCVVCMQTVTSTLELKIHGTFHMQKLAGSSAASSPNGQGLQKLYKCALCLKEFRSKQDLVKLDVNGLPYGLCAGCMARSANGQVGGLAPPEPADRPCAGLRCPECSVKFESAEDLESHMQVDHRDLTPETSGPRKGTQTSPVPRKKTYQCIKCQMTFENEREIQIHVANHMIEEGINHECKLCNQMFDSPAKLLCHLIEHSFEGMGGTFKCPVCFTVFVQANKLQQHIFAVHGQEDKIYDCSQCPQKFFFQTELQNHTMSQHAQ

SEQ ID NO: 38380 - protein, 1167 aa, Homo sapiens; identical to SEQ ID NO: 38379
  REGION 1..1167: note = ENSP00000455061

SEQ ID NO: 38381 - protein, 1224 aa, Homo sapiens; identical to SEQ ID NO: 38377
  REGION 1..1224: note = ENSP00000457664

SEQ ID NO: 38382 - protein, 102 aa, Homo sapiens
  REGION 1..102: note = ENSP00000479288
  VARIANT 1: note = Any amino acid
XEEGEASDFSLAWDSSVTAAGGLEGEPECDQKTSRALEDRNSVTSQEERNEDDEDMEDESIYTCDHCQQDFESLADLTDHRAHRCPGGNAKQPQDSDRWLHG

SEQ ID NO: 38383 - protein, 1284 aa, Homo sapiens; identical to SEQ ID NO: 38376
  REGION 1..1284: note = ENSP00000262383

SEQ ID NO: 38384 - protein, 2506 aa, Homo sapiens
  REGION 1..2506: note = ENSP00000277225
MEVLQCDGCDFRAPSYEDLKAHIQDVHTAFLQPTDVAEDNVNELRCGSVNASNQTEVEFSSIKDEFAIAEDLSGQNATSLGTGGYYGHSPGYYGQHIAANPKPTNKFFQCKFCVRYFRSKNLLIEHTRKVHGAQAEGSSSGPPVPGSLNYNIMMHEGFGKVFSCQFCTYKSPRRARIIKHQKMYHKNNLKETTAPPPAPAPMPDPVVPPVSLQDPCKELPAEVVERSILESMVKPLTKSRGNFCCEWCSYQTPRRERWCDHMMKKHRSMVKILSSLRQQQEGTNLPDVPNKSAPSPTSNSTYLTMNAASREIPNTTVSNFRGSMGNSIMRPNSSASKFSPMSYPQMKPKSPHNSGLVNLTERSRYGMTDMTNSSADLETNSMLNDSSSDEELNEIDSENGLSAMDHQTSGLSAEQLMGSDGNKLLETKGIPFRRFMNRFQCPFCPFLTMHRRSISRHIENIHLSGKTAVYKCDECPFTCKSSLKLGAHKQCHTGTTSDWDAVNSQSESISSSLNEGVVSYESSSINGRKSGVMLDPLQQQQPPQPPPPPPPPPPSQPQPLQQPQPPQLQPPHQVPPQPQTQPPPTQQPQPPTQAAPLHPYKCTMCNYSTTTLKGLRVHQQHKHSFCDNLPKFEGQPSSLPLENETDSHPSSSNTVKKSQTSILGLSSKNNFVAKASRKLANDFPLDLSPVKKRTRIDEIASNLQSKINQTKQQEDAVINVEDDEEEEEDNEVEIEVELDREEEPTEPIIEVPTSFSAQQIWVRDTSEPQKEPNFRNITHDYNATNGAEIELTLSEDEEDYYGSSTNLKDHQVSNTALLNTQTPIYGTEHNSENTDFGDSGRLYYCKHCDFNNKSARSVSTHYQRMHPYIKFSFRYILDPNDHSAVYRCLECYIDYTNFEDLQQHYGEHHPEAMNVLNFDHSDLIYRCRFCSYTSPNVRSLMPHYQRMHPTVKINNAMIFSSYVVEQQEGLNTESQTLREILNSAPKNMATSTPVARGGGLPATFNKNTPKTFTPECENQKDPLVNTVVVYDCDVCSFASPNMHSVLVHYQKKHPEEKASYFRIQKTMRMVSVDRGSALSQLSFEVGAPMSPKMSNMGSPPPPQPPPPDLSTELYYCKHCSYSNRSVVGVLVHYQKRHPEIKVTAKYIRQAPPTAAMMRGVEGPQGSPRPPAPIQQLNRSSSERDGPPVENEMFFCQHCDYGNRTVKGVLIHYQKKHRDFKANADVIRQHTATIRSLCDRNQKKPASCVLVSPSNLERDKTKLRALKCRQCSYTSPYFYALRKHIKKDHPALKATVTSIMRWAFLDGLIEAGYHCEWCIYSHTEPNGLLLHYQRRHPEHYVDYTYMATKLWAGPDPSPPSLTMPAEAKTYRCRDCVFEAVSIWDITNHYQAFHPWAMNGDESVLLDIIKEKDAVEKPILSSEELAGPVNCENSIPTPFPEQEAECPEDARLSPEKSLQLASANPAISSTPYQCTVCQSEYNNLHGLLTHYGKKHPGMKVKAADFAQDIDINPGAVYKCRHCPYINTRIHGVLTHYQKRHPSIKVTAEDFVHDVEQSADISQNDVEETSRIFKQGYGAYRCKLCPYTHGTLEKLKIHYEKYHNQPEFDVFSQSPPKLPVPLEPEMTTEVSPSQVSITEEEVGEEPVSTSHFSTSHLVSHTVFRCQLCKYFCSTRKGIARHYRIKHNNVRAQPEGKNNLFKCALCAYTNPIRKGLAAHYQKRHDIDAYYTHCLAASRTISDKPNKVIIPSPPKDDSPQLSEELRRAVEKKKCSLCSFQSFSKKGIVSHYMKRHPGVFPKKQHASKLGGYFTAVYADEHEKPTLMEEEERGNFEKAEVEGEAQEIEWLPFRCIKCFKLSFSTAELLCMHYTDHHSRDLKRDFIILGNGPRLQNSTYQCKHCDSKLQSTAELTSHLNIHNEEFQKRAKRQERRKQLLSKQKYADGAFADFKQERPFGHLEEVPKIKERKVVGYKCKFCVEVHPTLRAICNHLRKHVQYGNVPAVSAAVKGLRSHERSHLALAMFTREDKYSCQYCSFVSAFRHNLDRHMQTHHGHHKPFRCKLCSFKSSYNSRLKTHILKAHAGEHAYKCSWCSFSTMTISQLKEHSLKVHGKALTLPRPRIVSLLSSHSHHSSQKATPAEEVEDSNDSSYSEPPDVQQQLNHYQSAALARNNSRVSPVPLSGAAAGTEQKTEAVLHCEFCEFSSGYIQSIRRHYRDKHGGKKLFKCKDCSFYTGFKSAFTMHVEAGHSAVPEEGPKDLRCPLCLYHTKYKRNMIDHIVLHREERVVPIEVCRSKLSKYLQGVVFRCDKCTFTCSSDESLQQHIEKHNELKPYKCQLCYYETKHTEELDSHLRDEHKVSRNFELVGRVNLDQLEQMKEKMESSSSDDEDKEEEMNSKAEDRELMRFSDHGAALNTEKRFPCEFCGRAFSQGSEWERHVLRHGMALNDTKQVSREEIHPKEIMENSVKMPSIEEKEDDEAIGIDFSLKNETVAICVVTADKSLLENAEAKKE

SEQ ID NO: 38385 - protein, 110 aa, Homo sapiens
  REGION 1..110: note = ENSP00000476222
MEVLQCDGCDFRAPSYEDLKAHIQDVHTAFLQPTDVAEDNVNELRCGSVNASNQTEVEFSSIKDEFAIAEDLSGQNATSLGTGGYYGHSPGYYAFWSLRRGAKDQGEESG

SEQ ID NO: 38386 - protein, 1449 aa, Homo sapiens
  REGION 1..1449: note = ENSP00000363818
HCSYSNRSVVGVLVHYQKRHPEIKVTAKYIRQAPPTAAMMRGVEGPQGSPRPPAPIQQLNRSSSERDGPPVENEMFFCQHCDYGNRTVKGVLIHYQKKHRDFKANADVIRQHTATIRSLCDRNQKKPASCVLVSPSNLERDKTKLRALKCRQCSYTSPYFYALRKHIKKDHPALKATVTSIMRWAFLDGLIEAGYHCEWCIYSHTEPNGLLLHYQRRHPEHYVDYTYMATKLWAGPDPSPPSLTMPAEAKTYRCRDCVFEAVSIWDITNHYQAFHPWAMNGDESVLLDIIKEKDAVEKPILSSEELAGPVNCENSIPTPFPEQEAECPEDARLSPEKSLQLASANPAISSTPYQCTVCQSEYNNLHGLLTHYGKKHPGMKVKAADFAQDIDINPGAVYKCRHCPYINTRIHGVLTHYQKRHPSIKVTAEDFVHDVEQSADISQNDVEETSRIFKQGYGAYRCKLCPYTHGTLEKLKIHYEKYHNQPEFDVFSQSPPKLPVPLEPEMTTEVSPSQVSITEEEVGEEPVSTSHFSTSHLVSHTVFRCQLCKYFCSTRKGIARHYRIKHNNVRAQPEGKNNLFKCALCAYTNPIRKGLAAHYQKRHDIDAYYTHCLAASRTISDKPNKVIIPSPPKDDSPQLSEELRRAVEKKKCSLCSFQSFSKKGIVSHYMKRHPGVFPKKQHASKLGGYFTAVYADEHEKPTLMEEEERGNFEKAEVEGEAQEIEWLPFRCIKCFKLSFSTAELLCMHYTDHHSRDLKRDFIILGNGPRLQNSTYQCKHCDSKLQSTAELTSHLNIHNEEFQKRAKRQERRKQLLSKQKYADGAFADFKQERPFGHLEEVPKIKERKVVGYKCKFCVEVHPTLRAICNHLRKHVQYGNVPAVSAAVKEADDPAHLFLDGLEAAKDASGALVGRVDGEHCLLDGMLEDETRPGGYHCSQCDRVLMSMQGLRSHERSHLALAMFTREDKYSCQYCSFVSAFRHNLDRHMQTHHGHHKPFRCKLCSFKSSYNSRLKTHILKAHAGEHAYKCSWCSFSTMTISQLKEHSLKVHGKALTLPRPRIVSLLSSHSHHSSQKATPAEEVEDSNDSSYSEPPDVQQQLNHYQSAALARNNSRVSPVPLSGAAAGTEQKTEAVLHCEFCEFSSGYIQSIRRHYRDKHGGKKLFKCKDCSFYTGFKSAFTMHVEAGHSAVPEEGPKDLRCPLCLYHTKYKRNMIDHIVLHREERVVPIEVCRSKLSKYLQGVVFRCDKCTFTCSSDESLQQHIEKHNELKPYKCQLCYYETKHTEELDSHLRDEHKVSRNFELVGRVNLDQLEQMKEKMESSSSDDEDKEEEMNSKAEDRELMRFSDHGAALNTEKRFPCEFCGRAFSQGSEWERHVLRHGMALNDTKQVSREEIHPKEIMENSVKMPSIEEKEDDEAIGIDFSLKNETVAICVVTADKSLLENAEAKKE

SEQ ID NO: 38387 - protein, 1412 aa, Homo sapiens
  REGION 1..1412: note = ENSP00000397306
MMRGVEGPQGSPRPPAPIQQLNRSSSERDGPPVENEMFFCQHCDYGNRTVKGVLIHYQKKHRDFKANADVIRQHTATIRSLCDRNQKKPASCVLVSPSNLERDKTKLRALKCRQCSYTSPYFYALRKHIKKDHPALKATVTSIMRWAFLDGLIEAGYHCEWCIYSHTEPNGLLLHYQRRHPEHYVDYTYMATKLWAGPDPSPPSLTMPAEAKTYRCRDCVFEAVSIWDITNHYQAFHPWAMNGDESVLLDIIKEKDAVEKPILSSEELAGPVNCENSIPTPFPEQEAECPEDARLSPEKSLQLASANPAISSTPYQCTVCQSEYNNLHGLLTHYGKKHPGMKVKAADFAQDIDINPGAVYKCRHCPYINTRIHGVLTHYQKRHPSIKVTAEDFVHDVEQSADISQNDVEETSRIFKQGYGAYRCKLCPYTHGTLEKLKIHYEKYHNQPEFDVFSQSPPKLPVPLEPEMTTEVSPSQVSITEEEVGEEPVSTSHFSTSHLVSHTVFRCQLCKYFCSTRKGIARHYRIKHNNVRAQPEGKNNLFKCALCAYTNPIRKGLAAHYQKRHDIDAYYTHCLAASRTISDKPNKVIIPSPPKDDSPQLSEELRRAVEKKKCSLCSFQSFSKKGIVSHYMKRHPGVFPKKQHASKLGGYFTAVYADEHEKPTLMEEEERGNFEKAEVEGEAQEIEWLPFRCIKCFKLSFSTAELLCMHYTDHHSRDLKRDFIILGNGPRLQNSTYQCKHCDSKLQSTAELTSHLNIHNEEFQKRAKRQERRKQLLSKQKYADGAFADFKQERPFGHLEEVPKIKERKVVGYKCKFCVEVHPTLRAICNHLRKHVQYGNVPAVSAAVKQEADDPAHLFLDGLEAAKDASGALVGRVDGEHCLLDGMLEDETRPGGYHCSQCDRVLMSMQGLRSHERSHLALAMFTREDKYSCQYCSFVSAFRHNLDRHMQTHHGHHKPFRCKLCSFKSSYNSRLKTHILKAHAGEHAYKCSWCSFSTMTISQLKEHSLKVHGKALTLPRPRIVSLLSSHSHHSSQKATPAEEVEDSNDSSYSEPPDVQQQLNHYQSAALARNNSRVSPVPLSGAAAGTEQKTEAVLHCEFCEFSSGYIQSIRRHYRDKHGGKKLFKCKDCSFYTGFKSAFTMHVEAGHSAVPEEGPKDLRCPLCLYHTKYKRNMIDHIVLHREERVVPIEVCRSKLSKYLQGVVFRCDKCTFTCSSDESLQQHIEKHNELKPYKCQLCYYETKHTEELDSHLRDEHKVSRNFELVGRVNLDQLEQMKEKMESSSSDDEDKEEEMNSKAEDRELMRFSDHGAALNTEKRFPCEFCGRAFSQGSEWERHVLRHGMALNDTKQVSREEIHPKEIMENSVKMPSIEEKEDDEAIGIDFSLKNETVAICVVTADKSLLENAEAKKE

SEQ ID NO: 38388 - protein, 208 aa, Homo sapiens
  REGION 1..208: note = ENSP00000405837
  VARIANT 1: note = Any amino acid
XEHSLKVHGKALTLPRPRIVSLLSSHSHHSSQKATPAEEVEDSNDSSYSEPPDVQQQLNHYQSAALARNNSRVSPVPLSGAAAGTEQKTEAVLHCEFCEFSSGYIQSIRRHYRDKHGGKKLFKCKDCSFYTGFKSAFTMHVEAGHSAVPEEGPKDLRCPLCLYHTKYKRNMIDHIVLHRGNLSNLVFLDAAGGRQQRWPSRDALSEWQ

SEQ ID NO: 38389 - protein, 1311 aa, Homo sapiens
  REGION 1..1311: note = ENSP00000354794
MSRRKQAKPRSLKDPNCKLEDKTEDGEALDCKKRPEDGEELEDEAVHSCDSCLQVFESLSDITEHKINQCQLTDGVDVEDDPTCSWPASSPSSKDQTSPSHGEGCDFGEEEGGPGLPYPCQFCDKSFSRLSYLKHHEQSHSDKLPFKCTYCSRLFKHKRSRDRHIKLHTGDKKYHCSECDAAFSRSDHLKIHLKTHTSNKPYKCAICRRGFLSSSSLHGHMQVHERNKDGSQSGSRMEDWKMKDTQKCSQCEEGFDFPEDLQKHIAECHPECSPNEDRAALQCVYCHELFVEETSLMNHMEQVHSGEKKNSCSICSESFHTVEELYSHMDSHQQPESCNHSNSPSLVTVGYTSVSSTTPDSNLSVDSSTMVEAAPPIPKSRGRKRAAQQTPDMTGPSSKQAKVTYSCIYCNKQLFSSLAVLQIHLKTMHLDKPEQAHICQYCLEVLPSLYNLNEHLKQVHEAQDPGLIVSAMPAIVYQCNFCSEVVNDLNTLQEHIRCSHGFANPAAKDSNAFFCPHCYMGFLTDSSLEEHIRQVHCDLSGSRFGSPVLGTPKEPVVEVYSCSYCTNSPIFNSVLKLNKHIKENHKNIPLALNYIHNGKKSRALSPLSPVAIEQTSLKMMQAVGGAPARPTGEYICNQCGAKYTSLDSFQTHLKTHLDTVLPKLTCPQCNKEFPNQESLLKHVTIHFMITSTYYICESCDKQFTSVDDLQKHLLDMHTFVFFRCTLCQEVFDSKVSIQLHLAVKHSNEKKVYRCTSCNWDFRNETDLQLHVKHNHLENQGKVHKCIFCGESFGTEVELQCHITTHSKKYNCKFCSKAFHAIILLEKHLREKHCVFETKTPNCGTNGASEQVQKEEVELQTLLTNSQESHNSHDGSEEDVDTSEPMYGCDICGAAYTMETLLQNHQLRDHNIRPGESAIVKKKAELIKGNYKCNVCSRTFFSENGLREHMQTHLGPVKHYMCPICGERFPSLLTLTEHKVTHSKSLDTGNCRICKMPLQSEEEFLEHCQMHPDLRNSLTGFRCVVCMQTVTSTLELKIHGTFHMQKTGNGSAVQTTGRGQHVQKLYKCASCLKEFRSKQDLVKLDINGLPYGLCAGCVNLSKSASPGINVPPGTNRPGLGQNENLSAIEGKGKVGGLKTRCSSCNVKFESESELQNHIQTIHRELVPDSNSTQLKTPQVSPMPRISPSQSDEKKTYQCIKCQMVFYNEWDIQVHVANHMIDEGLNHECKLCSQTFDSPAKLQCHLIEHSFEGMGGTFKCPVCFTVFVQANKLQQHIFSAHGQEDKIYDCTQCPQKFFFQTELQNHTMTQHSS

SEQ ID NO: 38390 - protein, 1091 aa, Homo sapiens
  REGION 1..1091: note = ENSP00000463000
MQVHERNKDGSQSGSRMEDWKMKDTQKCSQCEEGFDFPEDLQKHIAECHPECSPNEDRAALQCVYCHELFVEETSLMNHMEQVHSGEKKNSCSICSESFHTVEELYSHMDSHQQPESCNHSNSPSLVTVGYTSVSSTTPDSNLSVDSSTMVEAAPPIPKSRGRKRAAQQTPDMTGPSSKQAKVTYSCIYCNKQLFSSLAVLQIHLKTMHLDKPEQAHICQYCLEVLPSLYNLNEHLKQVHEAQDPGLIVSAMPAIVYQCNFCSEVVNDLNTLQEHIRCSHGFANPAAKDSNAFFCPHCYMGFLTDSSLEEHIRQVHCDLSGSRFGSPVLGTPKEPVVEVYSCSYCTNSPIFNSVLKLNKHIKENHKNIPLALNYIHNGKKSRALSPLSPVAIEQTSLKMMQAVGGAPARPTGEYICNQCGAKYTSLDSFQTHLKTHLDTVLPKLTCPQCNKEFPNQESLLKHVTIHFMITSTYYICESCDKQFTSVDDLQKHLLDMHTFVFFRCTLCQEVFDSKVSIQLHLAVKHSNEKKVYRCTSCNWDFRNETDLQLHVKHNHLENQGKVHKCIFCGESFGTEVELQCHITTHSKKYNCKFCSKAFHAIILLEKHLREKHCVFETKTPNCGTNGASEQVQKEEVELQTLLTNSQESHNSHDGSEEDVDTSEPMYGCDICGAAYTMETLLQNHQLRDHNIRPGESAIVKKKAELIKGNYKCNVCSRTFFSENGLREHMQTHLGPVKHYMCPICGERFPSLLTLTEHKVTHSKSLDTGNCRICKMPLQSEEEFLEHCQMHPDLRNSLTGFRCVVCMQTVTSTLELKIHGTFHMQKTGNGSAVQTTGRGQHVQKLYKCASCLKEFRSKQDLVKLDINGLPYGLCAGCVNLSKSASPGINVPPGTNRPGLGQNENLSAIEGKGKVGGLKTRCSSCNVKFESESELQNHIQTIHRELVPDSNSTQLKTPQVSPMPRISPSQSDEKKTYQCIKCQMVFYNEWDIQVHVANHMIDEGLNHECKLCSQTFDSPAKLQCHLIEHSFEGMGGTFKCPVCFTVFVQANKLQQHIFSAHGQEDKIYDCTQCPQKFFFQTELQNHTMTQHSS

SEQ ID NO: 38391 - protein, 1244 aa, Homo sapiens
  REGION 1..1244: note = ENSP00000382352
MSRRKQAKPRSLKDPNCKLEDKTEDGEALDCKKRPEDGEELEDEAVHSCDSCLQVFESLSDITEHKINQCQLTDGVDVEDDPTCSWPASSPSSKDQTSPSHGEGCDFGEEEGGPGLPYPCQFCDKSFSRLSYLKHHEQSHSDKLPFKCTYCSRLFKHKRSRDRHIKLHTGDKKYHCSECDAAFSRSDHLKIHLKTHTSNKPYKCAICRRGFLSSSSLHGHMQVHERNKDGSQSGSRMEDWKMKDTQKCSQCEEGFDFPEDLQKHIAECHPECSPNEDRAALQCVYCHELFVEETSLMNHMEQVHSGEKKNSCSICSESFHTVEELYSHMDSHQQPESCNHSNSPSLVTVGYTSVSSTTPDSNLSVDSSTMVEAAPPIPKSRGRKRAAQQTPDMTGPSSKQAKVTYSCIYCNKQLFSSLAVLQIHLKTMHLDKPEQAHICQYCLEVLPSLYNLNEHLKQVHEAQDPGLIVSAMPAIVYQCNFCSEVVNDLNTLQEHIRCSHGFANPAAKDSNAFFCPHCYMGFLTDSSLEEHIRQVHCDLSGSRFGSPVLGTPKEPVVEVYSCSYCTNSPIFNSVLKLNKHIKENHKNIPLALNYIHNGKKSRALSPLSPVAIEQTSLKMMQAVGGAPARPTGEYICNQCGAKYTSLDSFQTHLKTHLDTVLPKLTCPQCNKEFPNQESLLKHVTIHFMITSTYYICESCDKQFTSVDDLQKHLLDMHTFVFFRCTLCQEVFDSKVSIQLHLAVKHSNEKKVYRCTSCNWDFRNETDLQLHVKHNHLENQGKVHKCIFCGESFGTEVELQCHITTHSKKYNCKFCSKAFHAIILLEKHLREKHCVFETKTPNCGTNGASEQVQKEEVELQTLLTNSQESHNSHDGSEEDVDTSEPMYGCDICGAAYTMETLLQNHQLRDHNIRPGESAIVKKKAELIKGNYKCNVCSRTFFSENGLREHMQTHLGPVKHYMCPICGERFPSLLTLTEHKVTHSKSLDTGNCRICKMPLQSEEEFLEHCQMHPDLRNSLTGFRCVVCMQTVTSTLELKIHGTFHMQKTGNGSAVQTTGRGQHVQKLYKCASCLKEFRSKQDLVKLDINGLPYGLCAGCVNLSKSASPGINVPPGTNRPGLGQNENLSAIEGKGKVGGLKTRCSSCNVKFESESELQNHIQTIHRELVPDSNSTQLKTPQVSPMPRISPSQSDEDIVFSMTEETSAHANTTEIWNLSIASPRRPINASSVRWFSTMNGIFRFMLQIT

SEQ ID NO: 38392 - protein, 1311 aa, Homo sapiens; identical to SEQ ID NO: 38389
  REGION 1..1311: note = ENSP00000440768

SEQ ID NO: 38393 - protein, 184 aa, Homo sapiens
  REGION 1..184: note = ENSP00000463748
  VARIANT 1: note = Any amino acid
XQKTGNGSAVQTTGRGQHVQKLYKCASCLKEFRSKQDLVKLDINGLPYGLCAGCVNLSKSASPGINVPPGTNRPGLGQNENLSAIEGKGKVGGLKTRCSSCNVKFESESELQNHIQTIHRELVPDSNSTQLKTPQVSPMPRISPSQSDEKKTYQCIKCQMVFYNEWDIQVHVANHMIDSKTKDL

SEQ ID NO: 38394 - protein, 224 aa, Homo sapiens
  REGION 1..224: note = ENSP00000462724
MSRRKQAKPRSLKDPNCKLEDKTEDGEALDCKKRPEDGEELEDEAVHSCDSCLQVFESLSDITEHKINQCQLTDGVDVEDDPTCSWPASSPSSKDQTSPSHGEGCDFGEEEGGPGLPYPCQFCDKSFSRLSYLKHHEQSHSDKLPFKCTYCSRLFKHKRSRDRHIKLHTGDKKYHCSECDAAFSRSDHLKIHLKTHTSNKPYKCAICRRGFLSSSSLHGHMQVH

SEQ ID NO: 38395 - protein, 144 aa, Homo sapiens
  REGION 1..144: note = ENSP00000464415
MSRRKQAKPRSLKDPNCKLEDKTEDGEALDCKKRPEDGEELEDEAVHSCDSCLQVFESLSDITEHKINQCQLTDGVDVEDDPTCSWPASSPSSKDQTSPSHGEGCDFGEEEGGPGLPYPCQFCDKSFSRLSYLKHHEQSHSDKL

SEQ ID NO: 38396 - protein, 30 aa, Homo sapiens
  REGION 1..30: note = ENSP00000462746
MSRRKQAKPRSLKDPNCKLEDKTEDGEALD

SEQ ID NO: 38397 - protein, 1085 aa, Homo sapiens
  REGION 1..1085: note = ENSP00000427657
MRGGRGRGKRARSAAAAPGSEASFTESRGLQNKNRGGANGKGRRGSLNASGRRTPPNCAAEDIKASPSSTNKRKNKPPMELDLNSSSEDNKPGKRVRTNSRSTPTTPQGKPETTFLDQGCSSPVLIDCPHPNCNKKYKHINGLRYHQAHAHLDPENKLEFEPDSEDKISDCEEGLSNVALECSEPSTSVSAYDQLKAPASPGAGNPPGTPKGKRELMSNGPGSIIGAKAGKNSGKKKGLNNELNNLPVISNMTAALDSCSAADGSLAAEMPKLEAEGLIDKKNLGDKEKGKKATNCKTDKNLSKLKSARPIAPAPAPTPPQLIAIPTATFTTTTTGTIPGLPSLTTTVVQATPKSPPLKPIQPKPTIMGEPITVNPALVSLKDKKKKEKRKLKDKEGKETGSPKMDAKLGKLEDSKGASKDLPGHFLKDHLNKNEGLANGLSESQESRMASIKAEADKVYTFTDNAPSPSIGSASRLECSTLVNGQAPMAPLHVLTQNGAESSAAKTSSPAYSDISDAADDGGSDSRSEGMRSKASSPSDIISSKDSVVKGHSSTTAQSSQLKESHSPYYHSYDPYYSPSYMHPGQVGAPAAGNSGSTQGMKIKKESEEDAEKKDKAEQLDSKKVDHNSASLQPQHQSVITQRHPALAQSLYYGQYAYGLYMDQKSLMATSPAYRQQYEKYYEDQRLAEQKMAQTGRGDCERKSELPLKELGKEETKQKNMPSATISKAPSTPEPNKNHSKLGPSVPNKTEETGKSQLLSNHQQQLQADSFKAKQMENHQLIKEAVEMKSVMDSMKQTGVDPTSRFKQDPDSRTWHHYVYQPKYLDQQKSEELDREKKLKEDSPRKTPNKESGVPSLPVSLTSIKEEPKEAKHPDSQSMEESKLKNDDRKTPVNWKDSRGTRVAVSSPMSQHQSYIQYLHAYPYPQMYDPSHPAYRAVSPVLMHSYPGAYLSPGFHYPVYGKMSGREETEKVNTSPSVNTKTTTESKALDLLQQHANQYRSKSPAPVEKATAEREREAERERDRHSPFGQRHLHTHHHTHVGMGYPLIPGQYDPFQGLTSAALVASQQVAAQASASGMFPGQRRE

SEQ ID NO: 38398 - protein, 1512 aa, Homo sapiens
  REGION 1..1512: note = ENSP00000307746
MSVNISTAGKGVDPNTVDTYDSGDDWEIGVGNLIIDLDADLEKDRQKFEMNNSTTTTSSSNSKDCGGPASSGAGATAALADGLKFASVQASAPQGNSHKETSKSKVKRSKTSKDANKSLPSAALYGIPEISSTGKRQEVQGRPGEATGMNSALGQSVSSGGSGNPNSNSTSTSTSAATAGAGSCGKSKEEKPGKSQSSRGAKRDKDAGKSRKDKHDLLQGHQNGSGSQAPSGGHLYGFGAKSNGGGASPFHCGGTGSGSVAAAGEVSKSAPDSGLMGNSMLVKKEEEEEESHRRIKKLKTEKVDPLFTVPAPPPPISSSLTPQILPSYFSPSSSNIAAPVEQLLVRTRSVGVNTCEVGVVTEPECLGPCEPGTSVNLEGIVWHETEEGVLVVNVTWRNKTYVGTLLDCTKHDWAPPRFCESPTSDLEMRGGRGRGKRARSAAAAPGSEASFTESRGLQNKNRGGANGKGRRGSLNASGRRTPPNCAAEDIKASPSSTNKRKNKPPMELDLNSSSEDNKPGKRVRTNSRSTPTTPQGKPETTFLDQGCSSPVLIDCPHPNCNKKYKHINGLRYHQAHAHLDPENKLEFEPDSEDKISDCEEGLSNVALECSEPSTSVSAYDQLKAPASPGAGNPPGTPKGKRELMSNGPGSIIGAKAGKNSGKKKGLNNELNNLPVISNMTAALDSCSAADGSLAAEMPKLEAEGLIDKKNLGDKEKGKKATNCKTDKNLSKLKSARPIAPAPAPTPPQLIAIPTATFTTTTTGTIPGLPSLTTTVVQATPKSPPLKPIQPKPTIMGEPITVNPALVSLKDKKKKEKRKLKDKEGKETGSPKMDAKLGKLEDSKGASKDLPGHFLKDHLNKNEGLANGLSESQESRMASIKAEADKVYTFTDNAPSPSIGSASRLECSTLVNGQAPMAPLHVLTQNGAESSAAKTSSPAYSDISDAADDGGSDSRSEGMRSKASSPSDIISSKDSVVKGHSSTTAQSSQLKESHSPYYHSYDPYYSPSYMHPGQVGAPAAGNSGSTQGMKIKKESEEDAEKKDKAEQLDSKKVDHNSASLQPQHQSVITQRHPALAQSLYYGQYAYGLYMDQKSLMATSPAYRQQYEKYYEDQRLAEQKMAQTGRGDCERKSELPLKELGKEETKQKNMPSATISKAPSTPEPNKNHSKLGPSVPNKTEETGKSQLLSNHQQQLQADSFKAKQMENHQLIKEAVEMKSVMDSMKQTGVDPTSRFKQDPDSRTWHHYVYQPKYLDQQKSEELDREKKLKEDSPRKTPNKESGVPSLPVSLTSIKEEPKEAKHPDSQSMEESKLKNDDRKTPVNWKDSRGTRVAVSSPMSQHQSYIQYLHAYPYPQMYDPSHPAYRAVSPVLMHSYPGAYLSPGFHYPVYGKMSGREETEKVNTSPSVNTKTTTESKALDLLQQHANQYRSKSPAPVEKATAEREREAERERDRHSPFGQRHLHTHHHTHVGMGYPLIPGQYDPFQGLTSAALVASQQVAAQASASGMFPGQRRE

SEQ ID NO: 38399 - protein, 447 aa, Homo sapiens
  REGION 1..447: note = ENSP00000424086
MSVNISTAGKGVDPNTVDTYDSGDDWEIGVGNLIIDLDADLEKDRQKFEMNNSTTTTSSSNSKDCGGPASSGAGATAALADGLKFASVQASAPQGNSHKETSKSKVKRSKTSKDANKSLPSAALYGIPEISSTGKRQEVQGRPGEATGMNSALGQSVSSGGSGNPNSNSTSTSTSAATAGAGSCGKSKEEKPGKSQSSRGAKRDKDAGKSRKDKHDLLQGHQNGSGSQAPSGGHLYGFGAKSNGGGASPFHCGGTGSGSVAAAGEVSKSAPDSGLMGNSMLVKKEEEEEESHRRIKKLKTEKVDPLFTVPAPPPPISSSLTPQILPSYFSPSSSNIAAPVEQLLVRTRSVGVNTCEVGVVTEPECLGPCEPGTSVNLEGIVWHETEEGVLVVNVTWRNKTYVGTLLDCTKHDWAPPRTQIQEHGIIMYTSPNIWISKSQKNLIERRN

SEQ ID NO: 38400 - protein, 715 aa, Homo sapiens
  REGION 1..715: note = ENSP00000423279
MSVNISTAGKGVDPNTVDTYDSGDDWEIGVGNLIIDLDADLEKDRQKFEMNNSTTTTSSSNSKDCGGPASSGAGATAALADGLKFASVQASAPQGNSHKETSKSKVKRSKTSKDANKSLPSAALYGIPEISSTGKRQEVQGRPGEATGMNSALGQSVSSGGSGNPNSNSTSTSTSAATAGAGSCGKSKEEKPGKSQSSRGAKRDKDAGKSRKDKHDLLQGHQNGSGSQAPSGGHLYGFGAKSNGGGASPFHCGGTGSGSVAAAGEVSKSAPDSGLMGNSMLVKKEEEEEESHRRIKKLKTEKVDPLFTVPAPPPPISSSLTPQILPSYFSPSSSNIAAPVEQLLVRTRSVGVNTCEVGVVTEPECLGPCEPGTSVNLEGIVWHETEEGVLVVNVTWRNKTYVGTLLDCTKHDWAPPRFCESPTSDLEMRGGRGRGKRARSAAAAPGSEASFTESRGLQNKNRGGANGKGRRGSLNASGRRTPPNCAAEDIKASPSSTNKRKNKPPMELDLNSSSEDNKPGKRVRTNSRSTPTTPQGKPETTFLDQGCSSPVLIDCPHPNCNKKYKHINGLRYHQAHAHLDPENKLEFEPDSEDKISDCEEGLSNVALECSEPSTSVSAYDQLKAPASPGAGNPPGTPKGKRELMSNGPGSIIGAKAGKNSGKKKGLNNELNNLPVISNMTAALDSCSAADGSLAAEMPKLEAEGLIDKKNLGDKE

SEQ ID NO: 38401 - protein, 707 aa, Homo sapiens
  REGION 1..707: note = ENSP00000421899
MSVNISTAGKGVDPNTVDTYDSGDDWEIGVGNLIIDLDADLEKDRQKFEMNNSTTTTSSSNSKDCGGPASSGAGATAALADGLKFASVQASAPQGNSHKETSKSKVKRSKTSKDANKSLPSAALYGIPEISSTGKRQEVQGRPGEATGMNSALGQSVSSGGSGNPNSNSTSTSTSAATAGAGSCGKSKEEKPGKSQSSRGAKRDKDAGKSRKDKHDLLQGHQNGSGSQAPSGGHLYGFGAKSNGGGASPFHCGGTGSGSVAAAGEVSKSAPDSGLMGNSMLVKKEEEEEESHRRIKKLKTEKVDPLFTVPAPPPPISSSLTPQILPSYFSPSSSNIAAPVEQLLVRTRSVGVNTCEVGVVTEPECLGPCEPGTSVNLEGIVWHETEEGVLVVNVTWRNKTYVGTLLDCTKHDWAPPRFCESPTSDLEMRGGRGRGKRARSAAAAPGSEASFTESRGLQNKNRGGANGKGRRGSLNASGRRTPPNCAAEDIKASPSSTNKRKNKPPMELDLNSSSEDNKPGKRVRTNSRSTPTTPQGKPETTFLDQGCSSPVLIDCPHPNCNKKYKHINGLRYHQAHAHLDPENKLEFEPDSEDKISDCEEGLSNVALECSEPSTSVSAYDQLKAPASPGAGNPPGTPKGKRELMSNGPGSIIGAKAGKNSGKKKGLNNELNNLPVISNMTAALDSCSAADGSLAAEMPKLEAEGLID

SEQ ID NO: 38402 - protein, 447 aa, Homo sapiens; identical to SEQ ID NO: 38399
  REGION 1..447: note = ENSP00000477767

SEQ ID NO: 38403 - protein, 1349 aa, Homo sapiens
  REGION 1..1349: note = ENSP00000329638
MACYLVISSRHLSNGHYRGIKGVFRGPLCKNGSPSPDFAEKKSTAKALEDVKANFYCELCDKQYHKHQEFDNHINSYDHAHKQRLKELKQREFARNVASKSWKDEKKQEKALKRLHQLAELRQQSECVSGNGPAYKAPRVAIEKQLQQGIFPIKNGRKVSCMKSALLLKGKNLPRIISDKQRSTMPNRHQLQSDRRCLFGNQVLQTSSDLSNANHRTGVSFTFSKKVHLKLESSASVFSENTEETHDCNKSPIYKTKQTADKCKCCRFANKDTHLTKEKEVNISPSHLESVLHNTISINSKILQDKHDSIDETLEDSIGIHASFSKSNIHLSDVDFTPTSREKETRNTLKNTLENCVNHPCQANASFSPPNIYNHSDARISECLDEFSSLEPSEQKSTVHLNPNSRIENREKSLDKTERVSKNVQRLVKEACTHNVASKPLPFLHVQSKDGHTTLQWPTELLLFTKTEPCISYGCNPLYFDFKLSRNTKEDHNLEDLKTELGKKPLELKTKRESQVSGLTEDQQKLIQEDYQYPKPKTMIANPDWEKFQRKYNLDYSDSEPNKSEYTFSANDLEMKNPKVPLYLNTSLKDCAGKNNSSENKLKEASRAHWQGCRKAVLNDIDEDLSFPSYISRFKKHKLIPCSPHLEFEDERQFNCKSSPCTVGGHSDHGKDFSVILKSNHISMTSKVSGCGNQRYKRYSPQSCLSRYSSSLDTSPSSMSSLRSTCSSHRFNGNSRGNLLCFHKREHHSVERHKRKCLKHNCFYLSDDITKSSQMQSEPQKERNCKLWESFKNEKYSKRRYCHCRERQKLGKNQQQFSGLKSTRIIYCDSNSQISCTGSSKKPPNCQGTQHDRLDSYSIEKMYYLNKSKRNQESLGSPHICDLGKVRPMKCNSGNISCLLKNCSSGPSETTESNTAEGERTPLTAKILLERVQAKKCQEQSSNVEISSNSCKSELEAPSQVPCTIQLAPSGCNRQALPLSEKIQYASESRNDQDSAIPRTTEKDKSKSSHTNNFTILADTDCDNHLSKGIIHLVTESQSLNIKRDATTKEQSKPLISEIQPFIQSCDPVPNEFPGAFPSNKYTGVTDSTETQEDQINLDLQDVSMHINHVEGNINSYYDRTMQKPDKVEDGLEMCHKSISPPLIQQPITFSPDEIDKYKILQLQAQQHMQKQLLSKHLRVLPAAGPTAFSPASTVQTVPVHQHTSITTIHHTFLQHFAVSASLSSHSSHLPIAHLHPLSQAHFSPISFSTLTPTIIPAHPTFLAGHPLHLVAATPFHPSHITLQPLPPTAFIPTLFGPHLNPATTSIIHLNPLIQPVFQGQDFCHHSCSSQMQQLNEVKEALNVSTHLN

SEQ ID NO: 38404 - protein, 1266 aa, Homo sapiens
  REGION 1..1266: note = ENSP00000478506
RLKELKQREFARNVASKSWKDEKKQEKALKRLHQLAELRQQSECVSGNGPAYKAPRVAIEKQLQQGIFPIKNGRKVSCMKSALLLKGKNLPRIISDKQRSTMPNRHQLQSDRRCLFGNQVLQTSSDLSNANHRTGVSFTFSKKVHLKLESSASVFSENTEETHDCNKSPIYKTKQTADKCKCCRFANKDTHLTKEKEVNISPSHLESVLHNTISINSKILQDKHDSIDETLEDSIGIHASFSKSNIHLSDVDFTPTSREKETRNTLKNTLENCVNHPCQANASFSPPNIYNHSDARISECLDEFSSLEPSEQKSTVHLNPNSRIENREKSLDKTERVSKNVQRLVKEACTHNVASKPLPFLHVQSKDGHTTLQWPTELLLFTKTEPCISYGCNPLYFDFKLSRNTKEDHNLEDLKTELGKKPLELKTKRESQVSGLTEDQQKLIQEDYQYPKPKTMIANPDWEKFQRKYNLDYSDSEPNKSEYTFSANDLEMKNPKVPLYLNTSLKDCAGKNNSSENKLKEASRAHWQGCRKAVLNDIDEDLSFPSYISRFKKHKLIPCSPHLEFEDERQFNCKSSPCTVGGHSDHGKDFSVILKSNHISMTSKVSGCGNQRYKRYSPQSCLSRYSSSLDTSPSSMSSLRSTCSSHRFNGNSRGNLLCFHKREHHSVERHKRKCLKHNCFYLSDDITKSSQMQSEPQKERNCKLWESFKNEKYSKRRYCHCRERQKLGKNQQQFSGLKSTRIIYCDSNSQISCTGSSKKPPNCQGTQHDRLDSYSIEKMYYLNKSKRNQESLGSPHICDLGKVRPMKCNSGNISCLLKNCSSGPSETTESNTAEGERTPLTAKILLERVQAKKCQEQSSNVEISSNSCKSELEAPSQVPCTIQLAPSGCNRQALPLSEKIQYASESRNDQDSAIPRTTEKDKSKSSHTNNFTILADTDCDNHLSKGIIHLVTESQSLNIKRDATTKEQSKPLISEIQPFIQSCDPVPNEFPGAFPSNKYTGVTDSTETQEDQINLDLQDVSMHINHVEGNINSYYDRTMQKPDKVEDGLEMCHKSISPPLIQQPITFSPDEIDKYKILQLQAQQHMQKQLLSKHLRVLPAAGPTAFSPASTVQTVPVHQHTSITTIHHTFLQHFAVSASLSSHSSHLPIAHLHPLSQAHFSPISFSTLTPTIIPAHPTFLAGHPLHLVAATPFHPSHITLQPLPPTAFIPTLFGPHLNPATTSIIHLNPLIQPVFQGQDFCHHSCSSQMQQLNEVKEALNVSTHLN

SEQ ID NO: 38405 - protein, 1677 aa, Homo sapiens
  REGION 1..1677: note = ENSP00000490240
MEVPEPTCPAPPARDQPAPTPGPPGAPGGQASPHLTLGPVLLPPEQGLAPPTVFLKALPIPLYHTVPPGGLQPRAPLVTGSLDGGNVPFILSPVLQPEGPGPTQVGKPAAPTLTVNIVGTLPVLSPGLGPTLGSPGKVRNAGKYLCPHCGRDCLKPSVLEKHIRSHTGERPFPCATCGIAFKTQSNLYKHRRTQTHLNNSRLSSESEGAGGGLLEEGDKAGEPPRPEGRGESRCQGMHEGASERPLSPGAHVPLLAKNLDVRTEAAPCPGSAFADREAPWDSAPMASPGLPAASTQPWRKLPEQKSPTAGKPCALQRQQATAAEKPWDAKAPEGRLRKCESTDSGYLSRSDSAEQPHAPCSPLHSLSEHSAESEGEGGPGPGPGVAGAEPGAREAGLELEKKRLEERIAQLISHNQAVVDDAQLDNVRPRKTGLSKQGSIDLPTPYTYKDSFHFDIRALEPGRRRAPGPVRSTWTPPDKSRPLFFHSVPTQLSTTVECVPVTRSNSLPFVEGSRTWLEPREPRDPWSRTQKPLSPRPGPARLGCRSGLSSTDVPSGHPRALVRQAAVEDLPGTPIGDALVPAEDTDAKRTAAREAMAGKGRAGGRKCGQRRLKMFSQEKWQVYGDETFKRIYQKMKASPHGGKKAREVGMGSGAELGFPLQKEAAGSSGTVPTQDRRTPVHEDISAGATPEPWGNPPALEASLVTEPTKHGETVARRGDSDRPRVEEAVSSPALGGRDSPCSGSRSPLVSPNGRLELGWQMPPAPGPLKGGDVEAPRPVWPDPKLEGGARGVGDVQETCLWAQTVLRWPSRGSGEDKLPSERKKLKVEDLHSWKQPEPVSAETPGGPTQPASLSSQKQDADPGEVPGGSKESARQVGEPLESSGASLAAASVALKRVGPRDKATPLHPAAPAPAEHPSLATPPQAPRVLSALADNAFSPKYLLRLPQAETPLPLPIPWGPRHSQDSLCSSGWPEERASFVGSGLGTPLSPSPASGPSPGEADSILEDPSCSRPQDGRKGAQLGGDKGDRMATSRPAARELPISAPGAPREATSSPPTPTCEAHLVQDMEGDSHRIHRLCMGSTLARARLSGDVLNPWVPNWELGEPPGNAPEDPSSGPLVGPDPCSPLQPGSFLTALTRPQGVPPGWPELALSSHSGTSRSHSTRSPHSTQNPFPSLKAEPRLTWCCLSRSVPLPAEQKAKAASVYLAVHFPGSSLRDEGPNGPPGSNGGWTWTSPGEGGPAQMSKFSYPTVPGVMPQHQVSEPEWKKGLPWRAKMSRGNSKQRKLKINPKRYKGNFLQSCVQLRASRLRTPTWVRRRSRHPPALEGLKPCRTPGQTSSEIAGLNLQEEPSCATSESPPCCGKEEKKEGDCRQTLGTLSLGTSSRIVREMDKRTVKDISPSAGEHGDCTTHSTAATSGLSLQSDTCLAVVNDVPLPPGKGLDLGLLETQLLASQDSVSTDPKPYIFSDAQRPSSFGSKGTFPHHDIATSVAAVCISLPVRTDHIAQEIHSAESRDHSQTAGRTLTSSSPDSKVTEEGRAQTLLPGRPSSGQRISDSVPLESTEKTHLEIPASGPSSASSHHKEGRHKTFFPSRGQYGCGEMTVPCPSLGSDGRKRQVSGLITRKDSVVPSKPEQPIEIPEAPSKSLKKRSLEGMRKQTRVEFSDTSSDDEDRLVIEI

SEQ ID NO: 38406 - protein, 1677 aa, Homo sapiens; identical to SEQ ID NO: 38405
  REGION 1..1677: note = ENSP00000360069

SEQ ID NO: 38407 - protein, 1006 aa, Homo sapiens
  REGION 1..1006: note = ENSP00000326630
MSRRKQSNPRQIKRSLGDMEAREEVQLVGASHMEQKATAPEAPSPPSADVNSPPPLPPPTSPGGPKELEGQEPEPRPTEEEPGSPWSGPDELEPVVQDGQRRIRARLSLATGLSWGPFHGSVQTRASSPRQAEPSPALTLLLVDEACWLRTLPQALTEAEANTEIHRKDDALWCRVTKPVPAGGLLSVLLTAEPHSTPGHPVKKEPAEPTCPAPAHDLQLLPQQAGMASILATAVINKDVFPCKDCGIWYRSERNLQAHLLYYCASRQGTGSPAAAATDEKPKETYPNERVCPFPQCRKSCPSASSLEIHMRSHSGERPFVCLICLSAFTTKANCERHLKVHTDTLSGVCHSCGFISTTRDILYSHLVTNHMVCQPGSKGEIYSPGAGHPATKLPPDSLGSFQQQHTALQGPLASADLGLAPTPSPGLDRKALAEATNGEARAEPLAQNGGSSEPPAAPRSIKVEAVEEPEAAPILGPGEPGPQAPSRTPSPRSPAPARVKAELSSPTPGSSPVPGELGLAGALFLPQYVFGPDAAPPASEILAKMSELVHSRLQQGAGAGAGGAQTGLFPGAPKGATCFECEITFSNVNNYYVHKRLYCSGRRAPEDAPAARRPKAPPGPARAPPGQPAEPDAPRSSPGPGAREEGAGGAATPEDGAGGRGSEGSQSPGSSVDDAEDDPSRTLCEACNIRFSRHETYTVHKRYYCASRHDPPPRRPAAPPGPPGPAAPPAPSPAAPVRTRRRRKLYELHAAGAPPPPPPGHAPAPESPRPGSGSGSGPGLAPARSPGPAADGPIDLSKKPRRPLPGAPAPALADYHECTACRVSFHSLEAYLAHKKYSCPAAPPPGALGLPAAACPYCPPNGPVRGDLLEHFRLAHGLLLGAPLAGPGVEARTPADRGPSPAPAPAASPQPGSRGPRDGLGPEPQEPPPGPPPSPAAAPEAVPPPPAPPSYSDKGVQTPSKGTPAPLPNGNHRYCRLCNIKFSSLSTFIAHKKYYCSSHAAEHVK

SEQ ID NO: 38408 - protein, 158 aa, Homo sapiens
  REGION 1..158: note = ENSP00000482796
MSRRKQSNPRQIKRSLGDMEAREEVQLVGASHMEQKATAPEAPSPPSADVNSPPPLPPPTSPGGPKELEGQEPEPRPTEEEPGSPWSGPDELEPVVQDGQRRIRARLSLATGLSWGPFHGSVQTRASSPRQAEPMRKLRLQDVKSIAQIPRIKQQREK

SEQ ID NO: 38409 - protein, 117 aa, Homo sapiens
  REGION 1..117: note = ENSP00000484216
MSRRKQSNPRQIKRSLGDMEAREEVQLVGASHMEQKATAPEAPSPPSADELEPVVQDGQRRIRARLSLATGLSWGPFHGSVQTRASSPRQAEPMRKLRLQDVKSIAQIPRIKQQREK

SEQ ID NO: 38410 - protein, 151 aa, Homo sapiens
  REGION 1..151: note = ENSP00000480412
MSRRKQSNPRQIKRSLGDMEAREEVQLVGASHMEQKATAPEAPSPPSADVNSPPPLPPPTSPGGPKELEGQEPEPRPTEEEPGSPWSGPDELEPVVQDGQRRIRARLSLATGLSWGPFHGSVQTRASSPRQAEPRGAISALAPSVQTHRTR

SEQ ID NO: 38411 - protein, 1151 aa, Homo sapiens
  REGION 1..1151: note = ENSP00000384179
MSRRKQSKPRQIKRPLEDAIEDEEEECPSEETDIISKGDFPLEESFSTEFGPENLSCEEVEYFCNKGDDEGIQETAESDGDTQSEKPGQPGVETDDWDGPGELEVFQKDGERKIQSRQQLPVGTTWGPFPGKMDLNNNSLKTKAQVPMVLTAGPKWLLDVTWQGVEDNKNNCIVYSKGGQLWCTTTKAISEGEELIAFVVDFDSRLQAASQMTLTEGMYPARLLDSIQLLPQQAAMASILPTAIVNKDIFPCKSCGIWYRSERNLQAHLMYYCSGRQREAAPVSEENEDSAHQISSLCPFPQCTKSFSNARALEMHLNSHSGVKMEEFLPPGASLKCTVCSYTADSVINFHQHLFSHLTQAAFRCNHCHFGFQTQRELLQHQELHVPSGKLPRESDMEHSPSATEDSLQPATDLLTRSELPQSQKAMQTKDASSDTELDKCEKKTQLFLTNQRPEIQPTTNKQSFSYTKIKSEPSSPRLASSPVQPNIGPSFPVGPFLSQFSFPQDITMVPQASEILAKMSELVHRRLRHGSSSYPPVIYSPLMPKGATCFECNITFNNLDNYLVHKKHYCSSRWQQMAKSPEFPSVSEKMPEALSPNTGQTSINLLNPAAHSADPENPLLQTSCINSSTVLDLIGPNGKGHDKDFSTQTKKLSTSSNNDDKINGKPVDVKNPSVPLVDGESDPNKTTCEACNITFSRHETYMVHKQYYCATRHDPPLKRSASNKVPAMQRTMRTRKRRKMYEMCLPEQEQRPPLVQQRFLDVANLNNPCTSTQEPTEGLGECYHPRCDIFPGIVSKHLETSLTINKCVPVSKCDTTHSSVSCLEMDVPIDLSKKCLSQSERTTTSPKRLLDYHECTVCKISFNKVENYLAHKQNFCPVTAHQRNDLGQLDGKVFPNPESERNSPDVSYERSIIKCEKNGNLKQPSPNGNLFSSHLATLQGLKVFSEAAQLIATKEENRHLFLPQCLYPGAIKKAKGADQLSPYYGIKPSDYISGSLVIHNTDIEQSRNAENESPKGQASSNGCAALKKDSLPLLPKNRGMVIVNGGLKQDERPAANPQQENISQNPQHEDDHKSPSWISENPLAANENVSPGIPSAEEQLSSIAKGVNGSSQAPTSGKYCRLCDIQFNNLSNFITHKKFYCSSHAAEHVK

SEQ ID NO: 38412 - protein, 1019 aa, Homo sapiens
  REGION 1..1019: note = ENSP00000430757
MDLNNNSLKTKAQVPMVLTAGPKWLLDVTWQGVEDNKNNCIVYSKGGQLWCTTTKAISEGEELIAFVVDFDSRLQAASQMTLTEGMYPARLLDSIQLLPQQAAMASILPTAIVNKDIFPCKSCGIWYRSERNLQAHLMYYCSGRQREAAPVSEENEDSAHQISSLCPFPQCTKSFSNARALEMHLNSHSGVKMEEFLPPGASLKCTVCSYTADSVINFHQHLFSHLTQAAFRCNHCHFGFQTQRELLQHQELHVPSGKLPRESDMEHSPSATEDSLQPATDLLTRSELPQSQKAMQTKDASSDTELDKCEKKTQLFLTNQRPEIQPTTNKQSFSYTKIKSEPSSPRLASSPVQPNIGPSFPVGPFLSQFSFPQDITMVPQASEILAKMSELVHRRLRHGSSSYPPVIYSPLMPKGATCFECNITFNNLDNYLVHKKHYCSSRWQQMAKSPEFPSVSEKMPEALSPNTGQTSINLLNPAAHSADPENPLLQTSCINSSTVLDLIGPNGKGHDKDFSTQTKKLSTSSNNDDKINGKPVDVKNPSVPLVDGESDPNKTTCEACNITFSRHETYMVHKQYYCATRHDPPLKRSASNKVPAMQRTMRTRKRRKMYEMCLPEQEQRPPLVQQRFLDVANLNNPCTSTQEPTEGLGECYHPRCDIFPGIVSKHLETSLTINKCVPVSKCDTTHSSVSCLEMDVPIDLSKKCLSQSERTTTSPKRLLDYHECTVCKISFNKVENYLAHKQNFCPVTAHQRNDLGQLDGKVFPNPESERNSPDVSYERSIIKCEKNGNLKQPSPNGNLFSSHLATLQGLKVFSEAAQLIATKEENRHLFLPQCLYPGAIKKAKGADQLSPYYGIKPSDYISGSLVIHNTDIEQSRNAENESPKGQASSNGCAALKKDSLPLLPKNRGMVIVNGGLKQDERPAANPQQENISQNPQHEDDHKSPSWISENPLAANENVSPGIPSAEEQLSSIAKGVNGSSQAPTSGKYCRLCDIQFNNLSNFITHKKFYCSSHAAEHVK

SEQ ID NO: 38413 - protein, 26 aa, Homo sapiens
  REGION 1..26: note = ENSP00000428149
MDLNNNSLKTKAQVPMVLTAGPKWLL

SEQ ID NO: 38414 - protein, 1019 aa, Homo sapiens; identical to SEQ ID NO: 38412
  REGION 1..1019: note = ENSP00000428720

SEQ ID NO: 38415 - protein, 135 aa, Homo sapiens
  REGION 1..135: note = ENSP00000411637
MDEDGLELQQEPNSFFDATGADGTHMDGDQIVVEVQETVFVSDVVDSDITVHNFVPDDPDSVVIQDVIEDVVIEDVQCPDIMEEADVSETVIIPEQVLDSDVTEEVSLAHCTVPDDVLASDITSASMSMPEHVLT

SEQ ID NO: 38416 - protein, 31 aa, Homo sapiens
  REGION 1..31: note = ENSP00000416298
MDEDGLELQQEPNSFFDATGADGTHMDGDQI

SEQ ID NO: 38417 - protein, 805 aa, Homo sapiens
  REGION 1..805: note = ENSP00000368475
MDEDGLELQQEPNSFFDATGADGTHMDGDQIVVEVQETVFVSDVVDSDITVHNFVPDDPDSVVIQDVIEDVVIEDVQCPDIMEEADVSETVIIPEQVLDSDVTEEVSLAHCTVPDDVLASDITSASMSMPEHVLTGDSIHVSDVGHVGHVGHVEHVVHDSVVEAEIVTDPLTTDVVSEEVLVADCASEAVIDANGIPVDQQDDDKGNCEDYLMISLDDAGKIEHDGSSGMTMDTESEIDPCKVDGTCPEVIKVYIFKADPGEDDLGGTVDIVESEPENDHGVELLDQNSSIRVPREKMVYMTVNDSQPEDEDLNVAEIADEVYMEVIVGEEDAAAAAAAAAVHEQQMDDNEIKTFMPIAWAAAYGNNSDGIENRNGTASALLHIDESAGLGRLAKQKPKKRRRPDSRQYQTAIIIGPDGHPLTVYPCMICGKKFKSRGFLKRHMKNHPEHLAKKKYRCTDCDYTTNKKISLHNHLESHKLTSKAEKAIECDECGKHFSHAGALFTHKMVHKEKGANKMHKCKFCEYETAEQGLLNRHLLAVHSKNFPHICVECGKGFRHPSELKKHMRIHTGEKPYQCQYCEYRSADSSNLKTHVKTKHSKEMPFKCDICLLTFSDTKEVQQHALIHQESKTHQCLHCDHKSSNSSDLKRHIISVHTKDYPHKCDMCDKGFHRPSELKKHVAAHKGKKMHQCRHCDFKIADPFVLSRHILSVHTKDLPFRCKRCRKGFRQQSELKKHMKTHSGRKVYQCEYCEYSTTDASGFKRHVISIHTKDYPHRCEYCKKGFRRPSEKNQHIMRHHKEVGLP

SEQ ID NO: 38418 - protein, 805 aa, Homo sapiens; identical to SEQ ID NO: 38417
  REGION 1..805: note = ENSP00000304985

SEQ ID NO: 38419 - protein, 755 aa, Homo sapiens
  REGION 1..755: note = ENSP00000343384
MDEDGLELQQEPNSFFDATGADGTHMDGDQIVVEVQETVFVSDVVDSDITVHNFVPDDPDSVVIQDVIEDVVIEDVQCPDIMEEADVSETVIIPEQVLDSDVTEEVSLAHCTVPDDVLASDITSASMSMPEHVLTGDSIHVSDVGHVGHVGHVEHVVHDSVVEAEIVTDPLTTDVVSEEVLVADCASEAVIDANGIPVDQQDDDKGNCEDYLMISCGTVDIVESEPENDHGVELLDQNSSIRVPREKMVYMTVNDSQPEDEDLNVAEIADEVYMEVIVGEEDAAAAAAAAAVHEQQMDDNEIKTFMPIAWAAAYGNNSDGIENRNGTASALLHIDESAGLGRLAKQKPKKRRRPDSRQYQTAIIIGPDGHPLTVYPCMICGKKFKSRGFLKRHMKNHPEHLAKKKYRCTDCDYTTNKKISLHNHLESHKLTSKAEKAIECDECGKHFSHAGALFTHKMVHKEKGANKMHKCKFCEYETAEQGLLNRHLLAVHSKNFPHICVECGKGFRHPSELKKHMRIHTGEKPYQCQYCEYRSADSSNLKTHVKTKHSKEMPFKCDICLLTFSDTKEVQQHALIHQESKTHQCLHCDHKSSNSSDLKRHIISVHTKDYPHKCDMCDKGFHRPSELKKHVAAHKGKKMHQCRHCDFKIADPFVLSRHILSVHTKDLPFRCKRCRKGFRQQSELKKHMKTHSGRKVYQCEYCEYSTTDASGFKRHVISIHTKDYPHRCEYCKKGFRRPSEKNQHIMRHHKEVGLP

SEQ ID NO: 38420 - protein, 844 aa, Homo sapiens
  REGION 1..844: note = ENSP00000368486
MDEDGLELQQEPNSFFDATDRVSFCHPGWSTVAPSGSTATSASQAQVICSASRVTGATGADGTHMDGDQIVVEVQETVFVSDVVDSDITVHNFVPDDPDSVVIQDVIEDVVIEDVQCPDIMEEADVSETVIIPEQVLDSDVTEEVSLAHCTVPDDVLASDITSASMSMPEHVLTGDSIHVSDVGHVGHVGHVEHVVHDSVVEAEIVTDPLTTDVVSEEVLVADCASEAVIDANGIPVDQQDDDKGNCEDYLMISLDDAGKIEHDGSSGMTMDTESEIDPCKVDGTCPEVIKVYIFKADPGEDDLGGTVDIVESEPENDHGVELLDQNSSIRVPREKMVYMTVNDSQPEDEDLNVAEIADEVYMEVIVGEEDAAAAAAAAAVHEQQMDDNEIKTFMPIAWAAAYGNNSDGIENRNGTASALLHIDESAGLGRLAKQKPKKRRRPDSRQYQTAIIIGPDGHPLTVYPCMICGKKFKSRGFLKRHMKNHPEHLAKKKYRCTDCDYTTNKKISLHNHLESHKLTSKAEKAIECDECGKHFSHAGALFTHKMVHKEKGANKMHKCKFCEYETAEQGLLNRHLLAVHSKNFPHICVECGKGFRHPSELKKHMRIHTGEKPYQCQYCEYRSADSSNLKTHVKTKHSKEMPFKCDICLLTFSDTKEVQQHALIHQESKTHQCLHCDHKSSNSSDLKRHIISVHTKDYPHKCDMCDKGFHRPSELKKHVAAHKGKKMHQCRHCDFKIADPFVLSRHILSVHTKDLPFRCKRCRKGFRQQSELKKHMKTHSGRKVYQCEYCEYSTTDASGFKRHVISIHTKDYPHRCEYCKKGFRRPSEKNQHIMRHHKEVGLP

SEQ ID NO: 38421 - protein, 576 aa, Homo sapiens
  REGION 1..576: note = ENSP00000438233
MTMDTESEIDPCKVDGTCPEVIKVYIFKADPGEDDLGGTVDIVESEPENDHGVELLDQNSSIRVPREKMVYMTVNDSQPEDEDLNVAEIADEVYMEVIVGEEDAAAAAAAAAVHEQQMDDNEIKTFMPIAWAAAYGNNSDGIENRNGTASALLHIDESAGLGRLAKQKPKKRRRPDSRQYQTAIIIGPDGHPLTVYPCMICGKKFKSRGFLKRHMKNHPEHLAKKKYRCTDCDYTTNKKISLHNHLESHKLTSKAEKAIECDECGKHFSHAGALFTHKMVHKEKGANKMHKCKFCEYETAEQGLLNRHLLAVHSKNFPHICVECGKGFRHPSELKKHMRIHTGEKPYQCQYCEYRSADSSNLKTHVKTKHSKEMPFKCDICLLTFSDTKEVQQHALIHQESKTHQCLHCDHKSSNSSDLKRHIISVHTKDYPHKCDMCDKGFHRPSELKKHVAAHKGKKMHQCRHCDFKIADPFVLSRHILSVHTKDLPFRCKRCRKGFRQQSELKKHMKTHSGRKVYQCEYCEYSTTDASGFKRHVISIHTKDYPHRCEYCKKGFRRPSEKNQHIMRHHKEVGLP

SEQ ID NO: 38422 - protein, 801 aa, Homo sapiens
  REGION 1..801: note = ENSP00000372525
MDEDEFELQPQEPNSFFDGIGADATHMDGDQIVVEIQEAVFVSNIVDSDITVHNFVPDDPDSVVIQDVVEDVVIEEDVQCSDILEEADVSENVIIPEQVLDSDVTEEVSLPHCTVPDDVLASDITSTSMSMPEHVLTSESMHVCDIGHVEHMVHDSVVEAEIITDPLTSDIVSEEVLVADCAPEAVIDASGISVDQQDNDKASCEDYLMISLDDAGKIEHDGSTGVTIDAESEMDPCKVDSTCPEVIKVYIFKADPGEDDLGGTVDIVESEPENDHGVELLDQNSSIRVPREKMVYMTVNDSQQEDEDLNVAEIADEVYMEVIVGEEDAAVAAAAAAVHEQQIDEDEMKTFVPIAWAAAYGNNSDGIENRNGTASALLHIDESAGLGRLAKQKPKKKRRPDSRQYQTAIIIGPDGHPLTVYPCMICGKKFKSRGFLKRHMKNHPEHLAKKKYHCTDCDYTTNKKISLHNHLESHKLTSKAEKAIECDECGKHFSHAGALFTHKMVHKEKGANKMHKCKFCEYETAEQGLLNRHLLAVHSKNFPHICVECGKGFRHPSELRKHMRIHTGEKPYQCQYCEYRSADSSNLKTHIKTKHSKEMPFKCDICLLTFSDTKEVQQHTLVHQESKTHQCLHCDHKSSNSSDLKRHVISVHTKDYPHKCEMCEKGFHRPSELKKHVAVHKGKKMHQCRHCDFKIADPFVLSRHILSVHTKDLPFRCKRCRKGFRQQNELKKHMKTHSGRKVYQCEYCEYSTTDASGFKRHVISIHTKDYPHRCEYCKKGFRRPSEKNQHIMRHHKEVGLP

SEQ ID NO: 38423 - protein, 610 aa, Homo sapiens
  REGION 1..610: note = ENSP00000485605
MDEDEFELQPQEPNSFFDGIVDDAGKIEHDGSTGVTIDAESEMDPCKVDSTCPEVIKVYIFKADPGEDDLGGTVDIVESEPENDHGVELLDQNSSIRVPREKMVYMTVNDSQQEDEDLNVAEIADEVYMEVIVGEEDAAVAAAAAAVHEQQIDEDEMKTFVPIAWAAAYGNNSDGIENRNGTASALLHIDESAGLGRLAKQKPKKKRRPDSRQYQTAIIIGPDGHPLTVYPCMICGKKFKSRGFLKRHMKNHPEHLAKKKYHCTDCDYTTNKKISLHNHLESHKLTSKAEKAIECDECGKHFSHAGALFTHKMVHKEKGANKMHKCKFCEYETAEQGLLNRHLLAVHSKNFPHICVECGKGFRHPSELRKHMRIHTGEKPYQCQYCEYRSADSSNLKTHIKTKHSKEMPFKCDICLLTFSDTKEVQQHTLVHQESKTHQCLHCDHKSSNSSDLKRHVISVHTKDYPHKCEMCEKGFHRPSELKKHVAVHKGKKMHQCRHCDFKIADPFVLSRHILSVHTKDLPFRCKRCRKGFRQQNELKKHMKTHSGRKVYQCEYCEYSTTDASGFKRHVISIHTKDYPHRCEYCKKGFRRPSEKNQHIMRHHKEVGLP

SEQ ID NO: 38424 - protein, 91 aa, Homo sapiens
  REGION 1..91: note = ENSP00000388814
MDEDEFELQPQEPNSFFDGIGADATHMDGDQIVVEIQEAVFVSNIVDSDITVHNFVPDDPDSVVIQDVVEDVVIEEDVQCSDILEEADVSE

SEQ ID NO: 38425 - protein, 724 aa, Homo sapiens
  REGION 1..724: note = ENSP00000393908
MDGDQIVVEIQEAVFVSNIVDSDITVHNFVPDDPDSVVIQDVVEDVVIEEDVQCSDILEEADVSENVIIPEQVLDSDVTEEVSLPHCTVPDDVLASDITSTSMSMPEHVLTSESMHVCDIGHVEHMVHDSVVEAEIITDPLTSDIVSEEVLVADCAPEAVIDASGISVDQQDNDKASCEDYLMISLDDAGKIEHDGSTGVTIDAESEMDPCKVDSTCPEVIKVYIFKADPGEDDLGGTVDIVESEPENDHGVELLDQNSSIRVPREKMVYMTVNDSQQEDEDLSNNSDGIENRNGTASALLHIDESAGLGRLAKQKPKKKRRPDSRQYQTAIIIGPDGHPLTVYPCMICGKKFKSRGFLKRHMKNHPEHLAKKKYHCTDCDYTTNKKISLHNHLESHKLTSKAEKAIECDECGKHFSHAGALFTHKMVHKEKGANKMHKCKFCEYETAEQGLLNRHLLAVHSKNFPHICVECGKGFRHPSELRKHMRIHTGEKPYQCQYCEYRSADSSNLKTHIKTKHSKEMPFKCDICLLTFSDTKEVQQHTLVHQESKTHQCLHCDHKSSNSSDLKRHVISVHTKDYPHKCEMCEKGFHRPSELKKHVAVHKGKKMHQCRHCDFKIADPFVLSRHILSVHTKDLPFRCKRCRKGFRQQNELKKHMKTHSGRKVYQCEYCEYSTTDASGFKRHVISIHTKDYPHRCEYCKKGFRRPSEKNQHIMRHHKEVGLP

SEQ ID NO: 38426 - protein, 801 aa, Homo sapiens; identical to SEQ ID NO: 38422
  REGION 1..801: note = ENSP00000155093

SEQ ID NO: 38427 - protein, 136 aa, Homo sapiens
  REGION 1..136: note = ENSP00000419664
  VARIANT 1: note = Any amino acid
XPFGADSRLQSQAPDSGEKPFKCEFEGCDRRFANSSDRKKHMHVHTSDKPYLCKMCDKSYTHPSSLRKHMKVHESSSQGSQPSPAASSGYESSTPPTIVSPSTDNPTTSSLSPSSSAVHHTAGHSALSSNFNEWYV

SEQ ID NO: 38428 - protein, 447 aa, Homo sapiens
  REGION 1..447: note = ENSP00000282928
MLLDAGPQYPAIGVTTFGASRHHSAGDVAERDVGLGINPFADGMGAFKLNPSSHELASAGQTAFTSQAPGYAAAAALGHHHHPGHVGSYSSAAFNSTRDFLFRNRGFGDAAAAASAQHSLFAASAGGFGGPHGHTDAAGHLLFPGLHEQAAGHASPNVVNGQMRLGFSGDMYPRPEQYGQVTSPRSEHYAAPQLHGYGPMNVNMAAHHGAGAFFRYMRQPIKQELICKWIEPEQLANPKKSCNKTFSTMHELVTHVTVEHVGGPEQSNHICFWEECPREGKPFKAKYKLVNHIRVHTGEKPFPCPFPGCGKVFARSENLKIHKRTHTGEKPFKCEFEGCDRRFANSSDRKKHMHVHTSDKPYLCKMCDKSYTHPSSLRKHMKVHESSSQGSQPSPAASSGYESSTPPTIVSPSTDNPTTSSLSPSSSAVHHTAGHSALSSNFNEWYV

SEQ ID NO: 38429 - protein, 532 aa, Homo sapiens
  REGION 1..532: note = ENSP00000365514
MLLDAGPQFPAIGVGSFARHHHHSAAAAAAAAAEMQDRELSLAAAQNGFVDSAAAHMGAFKLNPGAHELSPGQSSAFTSQGPGAYPGSAAAAAAAAALGPHAAHVGSYSGPPFNSTRDFLFRSRGFGDSAPGGGQHGLFGPGAGGLHHAHSDAQGHLLFPGLPEQHGPHGSQNVLNGQMRLGLPGEVFGRSEQYRQVASPRTDPYSAAQLHNQYGPMNMNMGMNMAAAAAHHHHHHHHHPGAFFRYMRQQCIKQELICKWIDPEQLSNPKKSCNKTFSTMHELVTHVSVEHVGGPEQSNHVCFWEECPREGKPFKAKYKLVNHIRVHTGEKPFPCPFPGCGKVFARSENLKIHKRTHTGEKPFQCEFEGCDRRFANSSDRKKHMHVHTSDKPYLCKMCDKSYTHPSSLRKHMKVHESSPQGSESSPAASSGYESSTPPGLVSPSAEPQSSSNLSPAAAAAAAAAAAAAAAVSAVHRGGGSGSGGAGGGSGGGSGSGGGGGGAGGGGGGSSGGGSGTAGGHSGLSSNFNEWYV

SEQ ID NO: 38430 - protein, 467 aa, Homo sapiens
  REGION 1..467: note = ENSP00000287538
MTMLLDGGPQFPGLGVGSFGAPRHHEMPNREPAGMGLNPFGDSTHAAAAAAAAAAFKLSPAAAHDLSSGQSSAFTPQGSGYANALGHHHHHHHHHHHTSQVPSYGGAASAAFNSTREFLFRQRSSGLSEAASGGGQHGLFAGSASSLHAPAGIPEPPSYLLFPGLHEQGAGHPSPTGHVDNNQVHLGLRGELFGRADPYRPVASPRTDPYAAGAQFPNYSPMNMNMGVNVAAHHGPGAFFRYMRQPIKQELSCKWIDEAQLSRPKKSCDRTFSTMHELVTHVTMEHVGGPEQNNHVCYWEECPREGKSFKAKYKLVNHIRVHTGEKPFPCPFPGCGKIFARSENLKIHKRTHTGEKPFKCEFEGCDRRFANSSDRKKHMHVHTSDKPYICKVCDKSYTHPSSLRKHMKVHESQGSDSSPAASSGYESSTPPAIASANSKDTTKTPSAVQTSTSHNPGLPPNFNEWYV

SEQ ID NO: 38431 - protein, 457 aa, Homo sapiens
  REGION 1..457: note = ENSP00000359638
MTMLLDGGPQFPGLGVGSFGAPRHHEMPNREPAGMGLNPFGDSTHAAAAAAAAAAFKLSPAAAHDLSSGQSSAFTPQGSGYANALGHHHHHHHHHHHTSQVPSYGGAASAAFNSTREFLFRQRSSGLSEAASGGGQHGLFAGSASSLHAPAGIPEPPSYLLFPGLHEQGAGHPSPTGHVDNNQVHLGLRGELFGRADPYRPVASPRTDPYAAGAQFPNYSPMNMNMGVNVAAHHGPGAFFRYMRQPIKQELSCKWIDEAQLSRPKKSCDRTFSTMHELVTHVTMEHVGGPEQNNHVCYWEECPREGKSFKAKYKLVNHIRVHTGEKPFPCPFPGCGKIFARSENLKIHKRTHTGEKPFKCEFEGCDRRFANSSDRKKHMHVHTSDKPYICKVCDKSYTHPSSLRKHMKCCPAWYPGQSLIPDEELDTDVGMQQPALHNTTYPKCRVNAEPTVQEMIY

SEQ ID NO: 38432 - protein, 334 aa, Homo sapiens
  REGION 1..334: note = ENSP00000372553
MRYKTSLVMRKRLRLYRNTLKESSSSSGHHGPQLTAASSPSVFPGLHEEPPQASPSRPLNGLLRLGLPGDMYARPEPFPPGPAARSDALAAAAALHGYGGMNLTVNLAAPHGPGAFFRYMRQPIKQELICKWLAADGTATPSLCSKTFSTMHELVTHVTVEHVGGPEQANHICFWEECPRQGKPFKAKYKLVNHIRVHTGEKPFPCPFPGCGKVFARSENLKIHKRTHTGEKPFRCEFEGCERRFANSSDRKKHSHVHTSDKPYTCKVRGCDKCYTHPSSLRKHMKVHGRSPPPSSGYDSATPSALVSPSSDCGHKSQVASSAAVAARTADLSE

SEQ ID NO: 38433 - protein, 334 aa, Homo sapiens; identical to SEQ ID NO: 38432
  REGION 1..334: note = ENSP00000417855

SEQ ID NO: 38434 - protein, 334 aa, Homo sapiens; identical to SEQ ID NO: 38432
  REGION 1..334: note = ENSP00000420775

SEQ ID NO: 38435 - protein, 128 aa, Homo sapiens
  REGION 1..128: note = ENSP00000418277
MRYKTSLVMRKRLRLYRNTLKESSEKPFRCEFEGCERRFANSSDRKKHSHVHTSDKPYTCKVRGCDKCYTHPSSLRKHMKVHGRSPPPSSGYDSATPSALVSPSSDCGHKSQVASSAAVAARTADLSE

SEQ ID NO: 38436 - protein, 229 aa, Homo sapiens
  REGION 1..229: note = ENSP00000420627
MRYKTSLVMRKRLRLYRNTLKESSSSSGHHGPQLTAASSPSVFPGLHEEPPQASPSRPLNGLLRLGLPGDMYARPEPFPPGPAARSDALAAAAALHGYGGMNLTVNLAAPHGPGAFFRYMRQPIKQELICKWLAADGTATPSLCSKTFSTMHELVTHVTVEHVGGPEQANHICFWEECPRQGKPFKAKYKLVNHIRVHTGEKPFPCPFPGCGKVFARSENLKIHKRTHT

SEQ ID NO: 38437 - protein, 77 aa, Homo sapiens
  REGION 1..77: note = ENSP00000418343
MRYKTSLVMRKRLRLYRNTLKESSSSSGHHGPQLTAASSPSVFPGLHEEPPQASPSRPLNGLLRLGLPGDMYARPEP

SEQ ID NO: 38438 - protein, 68 aa, Homo sapiens
  REGION 1..68: note = ENSP00000419727
MRYKTSLVMRKRLRLYRNTLKESSSSSGHHGPQLTAASSPSVFPGLHEEPPQASPSRPLNGLLRLGLP

SEQ ID NO: 38439 - protein, 372 aa, Homo sapiens
  REGION 1..372: note = ENSP00000397695
MNGPCQSLRKAEGLLEGCTSAVTVFRKLPLDSKAQSQKMRYKTSLVMRKRLRLYRNTLKESSSSSGHHGPQLTAASSPSVFPGLHEEPPQASPSRPLNGLLRLGLPGDMYARPEPFPPGPAARSDALAAAAALHGYGGMNLTVNLAAPHGPGAFFRYMRQPIKQELICKWLAADGTATPSLCSKTFSTMHELVTHVTVEHVGGPEQANHICFWEECPRQGKPFKAKYKLVNHIRVHTGEKPFPCPFPGCGKVFARSENLKIHKRTHTGEKPFRCEFEGCERRFANSSDRKKHSHVHTSDKPYTCKVRGCDKCYTHPSSLRKHMKVHGRSPPPSSGYDSATPSALVSPSSDCGHKSQVASSAAVAARTADLSE

SEQ ID NO: 38440 - protein, 384 aa, Homo sapiens
  REGION 1..384: note = ENSP00000435509
MPPFCRNAKLGLLSFLICAGRSLLPLGKNAFWLERIENNNTLWEKAQSQKMRYKTSLVMRKRLRLYRNTLKESSSSSGHHGPQLTAASSPSVFPGLHEEPPQASPSRPLNGLLRLGLPGDMYARPEPFPPGPAARSDALAAAAALHGYGGMNLTVNLAAPHGPGAFFRYMRQPIKQELICKWLAADGTATPSLCSKTFSTMHELVTHVTVEHVGGPEQANHICFWEECPRQGKPFKAKYKLVNHIRVHTGEKPFPCPFPGCGKVFARSENLKIHKRTHTGEKPFRCEFEGCERRFANSSDRKKHSHVHTSDKPYTCKVRGCDKCYTHPSSLRKHMKVHGRSPPPSSGYDSATPSALVSPSSDCGHKSQVASSAAVAARTADLSE

SEQ ID NO: 38441 - protein, 663 aa, Homo sapiens
  REGION 1..663: note = ENSP00000267294
MFLKAGRGNKVPPVRVYGPDCVVLMEPPLSKRNPPALRLADLATAQVQPLQNMTGFPALAGPPAHSQLRAAVAHLRLRDLGADPGVATTPLGPEHMAQASTLGLSPPSQAFPAHPEAPAAAARAAALVAHPGAGSYPCGGGSSGAQPSAPPPPAPPLPPTPSPPPPPPPPPPPALSGYTTTNSGGGGSSGKGHSRDFVLRRDLSATAPAAAMHGAPLGGEQRSGTGSPQHPAPPPHSAGMFISASGTYAGPDGSGGPALFPALHDTPGAPGGHPHPLNGQMRLGLAAAAAAAAAELYGRAEPPFAPRSGDAHYGAVAAAAAAALHGYGAVNLNLNLAAAAAAAAAGPGPHLQHHAPPPAPPPPPAPAQHPHQHHPHLPGAAGAFLRYMRQPIKQELICKWIDPDELAGLPPPPPPPPPPPPPPPAGGAKPCSKTFGTMHELVNHVTVEHVGGPEQSSHVCFWEDCPREGKPFKAKYKLINHIRVHTGEKPFPCPFPGCGKVFARSENLKIHKRTHTGEKPFKCEFDGCDRKFANSSDRKKHSHVHTSDKPYYCKIRGCDKSYTHPSSLRKHMKIHCKSPPPSPGPLGYSSVGTPVGAPLSPVLDPARSHSSTLSPQVTNLNEWYVCQASGAPSHLHTPSSNGTTSETEDEEIYGNPEVVRTIH

SEQ ID NO: 38442 - protein, 563 aa, Homo sapiens
  REGION 1..563: note = ENSP00000323148
MMTAESREATGLSPQAAQEKDGIVIVKVEEEDEEDHMWGQDSTLQDTPPPDPEIFRQRFRRFCYQNTFGPREALSRLKELCHQWLRPEINTKEQILELLVLEQFLSILPKELQVWLQEYRPDSGEEAVTLLEDLELDLSGQQVPGQVHGPEMLARGMVPLDPVQESSSFDLHHEATQSHFKHSSRKPRLLQSRALPAAHIPAPPHEGSPRDQAMASALFTADSQAMVKIEDMAVSLILEEWGCQNLARRNLSRDNRQENYGSAFPQGGENRNENEESTSKAETSEDSASRGETTGRSQKEFGEKRDQEGKTGERQQKNPEEKTRKEKRDSGPAIGKDKKTITGERGPREKGKGLGRSFSLSSNFTTPEEVPTGTKSHRCDECGKCFTRSSSLIRHKIIHTGEKPYECSECGKAFSLNSNLVLHQRIHTGEKPHECNECGKAFSHSSNLILHQRIHSGEKPYECNECGKAFSQSSDLTKHQRIHTGEKPYECSECGKAFNRNSYLILHRRIHTREKPYKCTKCGKAFTRSSTLTLHHRIHARERASEYSPASLDAFGAFLKSCV

SEQ ID NO: 38443 - protein, 527 aa, Homo sapiens
  REGION 1..527: note = ENSP00000409172
MWGQDSTLQDTPPPDPEIFRQRFRRFCYQNTFGPREALSRLKELCHQWLRPEINTKEQILELLVLEQFLSILPKELQVWLQEYRPDSGEEAVTLLEDLELDLSGQQVPGQVHGPEMLARGMVPLDPVQESSSFDLHHEATQSHFKHSSRKPRLLQSRALPAAHIPAPPHEGSPRDQAMASALFTADSQAMVKIEDMAVSLILEEWGCQNLARRNLSRDNRQENYGSAFPQGGENRNENEESTSKAETSEDSASRGETTGRSQKEFGEKRDQEGKTGERQQKNPEEKTRKEKRDSGPAIGKDKKTITGERGPREKGKGLGRSFSLSSNFTTPEEVPTGTKSHRCDECGKCFTRSSSLIRHKIIHTGEKPYECSECGKAFSLNSNLVLHQRIHTGEKPHECNECGKAFSHSSNLILHQRIHSGEKPYECNECGKAFSQSSDLTKHQRIHTGEKPYECSECGKAFNRNSYLILHRRIHTREKPYKCTKCGKAFTRSSTLTLHHRIHARERASEYSPASLDAFGAFLKSCV

SEQ ID NO: 38444 - protein, 125 aa, Homo sapiens
  REGION 1..125: note = ENSP00000394445
MMTAESREATGLSPQAAQEKDGIVIVKVEEEDEEDHMWGQDSTLQDTPPPDPEIFRQRFRRFCYQNTFGPREALSRLKELCHQWLRPEINTKEQILELLVLEQFLSILPKELQVWLQEYRPDSGE

SEQ ID NO: 38445 - protein, 527 aa, Homo sapiens; identical to SEQ ID NO: 38443
  REGION 1..527: note = ENSP00000480305

SEQ ID NO: 38446 - protein, 350 aa, Homo sapiens
  REGION 1..350: note = ENSP00000443508
MASALFTADSQAMVKIEDMAVSLILEEWGCQNLARRNLSRDNRQENYGSAFPQGGENRNENEESTSKAETSEDSASRGETTGRSQKEFGEKRDQEGKTGERQQKNPEEKTRKEKRDSGPAIGKDKKTITGERGPREKGKGLGRSFSLSSNFTTPEEVPTGTKSHRCDECGKCFTRSSSLIRHKIIHTGEKPYECSECGKAFSLNSNLVLHQRIHTGEKPHECNECGKAFSHSSNLILHQRIHSGEKPYECNECGKAFSQSSDLTKHQRIHTGEKPYECSECGKAFNRNSYLILHRRIHTREKPYKCTKCGKAFTRSSTLTLHHRIHARERASEYSPASLDAFGAFLKSCV

SEQ ID NO: 38447 - protein, 153 aa, Homo sapiens
  REGION 1..153: note = ENSP00000319785
MKSSDIDQDLFTDSYCKVCSAQLISESQRVAHYESRKHASKVRLYYMLHPRDGGCPAKRLRSENGSDADMVDKNKCCTLCNMSFTSAVVADSHYQGKIHAKRLKLLLGEKTPLKTTGLRRNYRCTICSVSLNSIEQYHAHLKGSKHQTNLKNK

SEQ ID NO: 38448 - protein, 229 aa, Homo sapiens
  REGION 1..229: note = ENSP00000297737
MKSSDIDQDLFTDSYCKVCSAQLISESQRVAHYESRKHASKVRLYYMLHPRDGGCPAKRLRSENGSDADMVDKNKCCTLCNMSFTSAVVADSHYQGKIHAKRLKLLLGEKTPLKTTATPLSPLKPPRMDTAPVVASPYQRRDSDRYCGLCAAWFNNPLMAQQHYDGKKHKKNAARVALLEQLGTTLDMGELRGLRRNYRCTICSVSLNSIEQYHAHLKGSKHQTNLKNK

SEQ ID NO: 38449 - protein, 211 aa, Homo sapiens
  REGION 1..211: note = ENSP00000428423
MKSSDIDQDLFTDSYCKVCSAQLISESQRVAHYESRKHASKVRLYYMLHPRDGGCPAKRLRSENGSDADMVDKNKCCTLCNMSFTSAVVADSHYQGKIHAKRLKLLLGEKTPLKTTATPLSPLKPPRMDTAPVVASPYQRRDSDRYCGLCAAWFNNPLMAQQHYDGKKHKKNAARVALLEQLGTTLDMGELRGLRRNYRCTICSVSLNSIE

SEQ ID NO: 38450 - protein, 61 aa, Homo sapiens
  REGION 1..61: note = ENSP00000430050
MKSSDIDQDLFTDSYCKVCSAQLISESQRVAHYEGPEFLRKGNFIRHTKPKEDVTLKKVAV

SEQ ID NO: 38451 - protein, 46 aa, Homo sapiens
  REGION 1..46: note = ENSP00000427918
MKSSDIDQDLFTDSYCKVCSAQLISESQRVAHYECGAVPLGMSNVT

SEQ ID NO: 38452 - protein, 46 aa, Homo sapiens; identical to SEQ ID NO: 38451
  REGION 1..46: note = ENSP00000429068

SEQ ID NO: 38453 - protein, 43 aa, Homo sapiens
  REGION 1..43: note = ENSP00000445997
MDAKSLTAWSRTLVTFKDVFVDFTREEWKLLDTAQQIVYRNVM

SEQ ID NO: 38454 - protein, 47 aa, Homo sapiens
  REGION 1..47: note = ENSP00000438232
MDAKSLTAWSRTLVTFKDVFVDFTREEWKLLDTAQQIVYRNVMLENY

SEQ ID NO: 38455 - protein, 573 aa, Homo sapiens
  REGION 1..573: note = ENSP00000248211
MDAKSLTAWSRTLVTFKDVFVDFTREEWKLLDTAQQIVYRNVMLENYKNLVSLGYQLTKPDVILRLEKGEEPWLVEREIHQETHPDSETAFEIKSSVSSRSIFKDKQSCDIKMEGMARNDLWYLSLEEVWKCRDQLDKYQENPERHLRQVAFTQKKVLTQERVSESGKYGGNCLLPAQLVLREYFHKRDSHTKSLKHDLVLNGHQDSCASNSNECGQTFCQNIHLIQFARTHTGDKSYKCPDNDNSLTHGSSLGISKGIHREKPYECKECGKFFSWRSNLTRHQLIHTGEKPYECKECGKSFSRSSHLIGHQKTHTGEEPYECKECGKSFSWFSHLVTHQRTHTGDKLYTCNQCGKSFVHSSRLIRHQRTHTGEKPYECPECGKSFRQSTHLILHQRTHVRVRPYECNECGKSYSQRSHLVVHHRIHTGLKPFECKDCGKCFSRSSHLYSHQRTHTGEKPYECHDCGKSFSQSSALIVHQRIHTGEKPYECCQCGKAFIRKNDLIKHQRIHVGEETYKCNQCGIIFSQNSPFIVHQIAHTGEQFLTCNQCGTALVNTSNLIGYQTNHIRENAY

SEQ ID NO: 38456 - protein, 72 aa, Homo sapiens
  REGION 1..72: note = ENSP00000441339
MDAKSLTAWSRTLVTFKDVFVDFTREEWKLLDTAQQIVYRNVMLENYKNLVSLGYQLTKPDVILRLEKGEEP

SEQ ID NO: 38457 - protein, 573 aa, Homo sapiens; identical to SEQ ID NO: 38455
  REGION 1..573: note = ENSP00000393814

SEQ ID NO: 38458 - protein, 439 aa, Homo sapiens
  REGION 1..439: note = ENSP00000384893
MDAKSLTAWSRTLVTFKDVFVDFTREEWKLLDTAQQIVYRNVMLENYKNLVSLGYQLTKPDVILRLEKGEEPWLVEREIHQETHPDSETAFEIKSSVSSRSIFKDKQSCDIKMEGMARNDLWYLSLEEVWKCRDQLDKYQENPERHLRHQLIHTGEKPYECKECGKSFSRSSHLIGHQKTHTGEEPYECKECGKSFSWFSHLVTHQRTHTGDKLYTCNQCGKSFVHSSRLIRHQRTHTGEKPYECPECGKSFRQSTHLILHQRTHVRVRPYECNECGKSYSQRSHLVVHHRIHTGLKPFECKDCGKCFSRSSHLYSHQRTHTGEKPYECHDCGKSFSQSSALIVHQRIHTGEKPYECCQCGKAFIRKNDLIKHQRIHVGEETYKCNQCGIIFSQNSPFIVHQIAHTGEQFLTCNQCGTALVNTSNLIGYQTNHIRENAY

SEQ ID NO: 38459 - protein, 73 aa, Homo sapiens
  REGION 1..73: note = ENSP00000462445
MSGHPGSWEMNSVAFEDVAVNFTQEEWALLDPSQKNLYRDVMQETFRNLASIGNKGEDQSIEDQYKNSSRNLR

SEQ ID NO: 38460 - protein, 77 aa, Homo sapiens
  REGION 1..77: note = ENSP00000463191
MSGHPGSWEMNSVAFEDVAVNFTQEEWALLDPSQKNLYRDVMQETFRNLASIGNKGEDQSIEDQYKNSSRNLRCTGS

SEQ ID NO: 38461 - protein, 289 aa, Homo sapiens
  REGION 1..289: note = ENSP00000340749
MSGHPGSWEMNSVAFEDVAVNFTQEEWALLDPSQKNLYRDVMQETFRNLASIGNKGEDQSIEDQYKNSSRNLSSFQIHQRNHTGEKPYECMECGKALGFSRSLNRHKRIHTGEKRYECKQCGKAFSRSSHLRDHERTHTGEKPYECKHCGKAFRYSNCLHYHERTHTGEKPYVCMECGKAFSCLSSLQGHIKAHAGEEPYPCKQCGKAFRYASSLQKHEKTHIAQKPYVCNNCGKGFRCSSSLRDHERTHTGEKPYECQKCGKAFSRASTLWKHKKTHTGEKPYKCKKM

SEQ ID NO: 38462 - protein, 351 aa, Homo sapiens
  REGION 1..351: note = ENSP00000440365
MSGHPGSWEMNSVAFEDVAVNFTQEEWALLDPSQKNLYRDVMQETFRNLASIGNKGEDQSIEDQYKNSSRNLRHIISHSGNNPYGCEECGKKPCTCKQCQKTSLSVTRVHRDTVMHTGNGHYGCTICEKVFNIPSSFQIHQRNHTGEKPYECMECGKALGFSRSLNRHKRIHTGEKRYECKQCGKAFSRSSHLRDHERTHTGEKPYECKHCGKAFRYSNCLHYHERTHTGEKPYVCMECGKAFSCLSSLQGHIKAHAGEEPYPCKQCGKAFRYASSLQKHEKTHIAQKPYVCNNCGKGFRCSSSLRDHERTHTGEKPYECQKCGKAFSRASTLWKHKKTHTGEKPYKCKKM

SEQ ID NO: 38463 - protein, 79 aa, Homo sapiens
  REGION 1..79: note = ENSP00000427003
MGSRYVPRLASNSWAELLLPNSASQSAGITSVSHRARPHLFLQSSPTAMEAEETMECLQEFPEHHKMILDRLNEQREQD

SEQ ID NO: 38464 - protein, 264 aa, Homo sapiens
  REGION 1..264: note = ENSP00000422079
MEAEETMECLQEFPEHHKMILDRLNEQREQDRFTDITLIVDGHHFKAHKAVLAACSKFFYKFFQEFTQEPLVEIEGVSKMAFRHLIEFTYTAKLMIQGEEEANDVWKAAEFLQMLEAIKALEVRNKENSAPLEENTTGKNEAKKRKIAETSNVITESLPSAESEPVEIEVEIAEGTIEVEDEGIETLEEVASAKQSVKYIQSTGSSDDSALALLADITSKYRQGDRKGQIKEDGCPSDPTSKQEHMKSHSTESFKCEICNKRYL

SEQ ID NO: 38465 - protein, 253 aa, Homo sapiens
  REGION 1..253: note = ENSP00000425623
MEAEETMECLQEFPEHHKMILDRLNEQREQDRFTDITLIVDGHHFKAHKAVLAACSKFFYKFFQEFTQEPLVEIEGVSKMAFRHLIEFTYTAKLMIQGEEEANDVWKAAEFLQMLEAIKALEVRNKENSAPLEENTTGKNEAKKRKIAETSNVITESLPSAESEPVEIEVEIAEGTIEVEDEGIETLEEVASAKQSVKYIQSTGSSDDSALALLADITSKYRQGDRKGQIKEDGCPSDPTSKQVEGAHEITLH

SEQ ID NO: 38466 - protein, 623 aa, Homo sapiens
  REGION 1..623: note = ENSP00000426504
MEAEETMECLQEFPEHHKMILDRLNEQREQDRFTDITLIVDGHHFKAHKAVLAACSKFFYKFFQEFTQEPLVEIEGVSKMAFRHLIEFTYTAKLMIQGEEEANDVWKAAEFLQMLEAIKALEVRNKENSAPLEENTTGKNEAKKRKIAETSNVITESLPSAESEPVEIEVEIAEGTIEVEDEGIETLEEVASAKQSVKYIQSTGSSDDSALALLADITSKYRQGDRKGQIKEDGCPSDPTSKQVEGIEIVELQLSHVKDLFHCEKCNRSFKLFYHFKEHMKSHSTESFKCEICNKRYLRESAWKQHLNCYHLEEGGVSKKQRTGKKIHVCQYCEKQFDHFGHFKEHLRKHTGEKPFECPNCHERFARNSTLKCHLTACQTGVGAKKGRKKLYECQVCNSVFNSWDQFKDHLVIHTGDKPNHCTLCDLWFMQGNELRRHLSDAHNISERLVTEEVLSVETRVQTEPVTSMTIIEQVGKVHVLPLLQVQVDSAQVTVEQVHPDLLQDSQVHDSHMSELPEQVQVSYLEVGRIQTEEGTEVHVEELHVERVNQMPVEVQTELLEADLDHVTPEIMNQEERESSQADAAEAAREDHEDAEDLETKPTVDSEAEKAENEDRTALPVLE

SEQ ID NO: 38467 - protein, 151 aa, Homo sapiens
  REGION 1..151: note = ENSP00000422659
MEAEETMECLQEFPEHHKMILDRLNEQREQDRFTDITLIVDGHHFKAHKAVLAACSKFFYKFFQEFTQEPLVEIEGVSKMAFRHLIEFTYTAKLMIQGEEEANDVWKAAEFLQMLEAIKALEVRNKENSAPLEENTTGKNEAKKRKIAETS

SEQ ID NO: 38468 - protein, 83 aa, Homo sapiens
  REGION 1..83: note = ENSP00000425139
MEAEETMECLQEFPEHHKMILDRLNEQREQDRFTDITLIVDGHHFKAHKAVLAACSKFFYKFFQEFTQEPLVEIEGTKKTQLP

SEQ ID NO: 38469 - protein, 589 aa, Homo sapiens
  REGION 1..589: note = ENSP00000305804
MEAEETMECLQEFPEHHKMILDRLNEQREQDRFTDITLIVDGHHFKAHKAVLAACSKFFYKFFQEFTQEPLVEIEGVSKMAFRHLIEFTYTAKLMIQGEEEANDVWKAAEFLQMLEAIKALEVRNKENSAPLEENTTGKNEAKKRKIAETSNVITESLPSAESEPVEIEVEIAEGTIEVEDEGIETLEEVASAKQSVKYIQSTGSSDDSALALLADITSKYRQGDRKGQIKEDGCPSDPTSKQEHMKSHSTESFKCEICNKRYLRESAWKQHLNCYHLEEGGVSKKQRTGKKIHVCQYCEKQFDHFGHFKEHLRKHTGEKPFECPNCHERFARNSTLKCHLTACQTGVGAKKGRKKLYECQVCNSVFNSWDQFKDHLVIHTGDKPNHCTLCDLWFMQGNELRRHLSDAHNISERLVTEEVLSVETRVQTEPVTSMTIIEQVGKVHVLPLLQVQVDSAQVTVEQVHPDLLQDSQVHDSHMSELPEQVQVSYLEVGRIQTEEGTEVHVEELHVERVNQMPVEVQTELLEADLDHVTPEIMNQEERESSQADAAEAAREDHEDAEDLETKPTVDSEAEKAENEDRTALPVLE

SEQ ID NO: 38470 - protein, 589 aa, Homo sapiens; identical to SEQ ID NO: 38469
  REGION 1..589: note = ENSP00000423945

SEQ ID NO: 38471 - protein, 589 aa, Homo sapiens; identical to SEQ ID NO: 38469
  REGION 1..589: note = ENSP00000421246

SEQ ID NO: 38472 - protein, 139 aa, Homo sapiens
  REGION 1..139: note = ENSP00000424771
MEAEETMECLQEFPEHHKMILDRLNEQREQDRFTDITLIVDGHHFKAHKAVLAACSKFFYKFFQEFTQEPLVEIEGVSKMAFRHLIEFTYTAKLMIQGEEEANDVWKAAEFLQMLEAIKALEVRNKENSAPLEENTTGK

SEQ ID NO: 38473 - protein, 66 aa, Homo sapiens
  REGION 1..66: note = ENSP00000425722
MEAEETMECLQEFPEHHKMILDRLNEQREQDRFTDITLIVDGHHFKAHKAVLAACSHVLPQIFSIL

SEQ ID NO: 38474 - protein, 124 aa, Homo sapiens
  REGION 1..124: note = ENSP00000426614
MEAEETMECLQEFPEHHKMILDRLNEQREQDRFTDITLIVDGHHFKAHKAVLAACSKFFYKFFQEFTQEPLVEIEGVSKMAFRHLIEFTYTAKLMIQGEEEANDVWKAAEFLQMLEAIKALEVR

SEQ ID NO: 38475 - protein, 68 aa, Homo sapiens
  REGION 1..68: note = ENSP00000423254
  VARIANT 1: note = Any amino acid
XKKQRTGKKIHVCQYCEKQFDHFGHFKEHLRKHTVLDAKKFTVMRPHLVRALPVATLQSPEAMQGITW

SEQ ID NO: 38476 - protein, 201 aa, Homo sapiens
  REGION 1..201: note = ENSP00000425799
MELLTFRDVAIEFSPEEWKCLDPDQQNLYRDVMLENYRNLVSLGVAISNPDLVTCLEQRKEPYNVKIHKIVARPPAMCSHFTQDHWPVQGIEDSFHKLILRRYEKCGHDNLQLRKGCKSLNECKLQKGGYNEFNECLSTTQSKILQCKASVKVVSKFSNSNKRKTRHTGEKHFKECGKSFQKFSHLTQHKNSSISMTTSPF

SEQ ID NO: 38477 - protein, 113 aa, Homo sapiens
  REGION 1..113: note = ENSP00000424403
MELLTFRDVAIEFSPEEWKCLDPDQQNLYRDVMLENYRNLVSLGVAISNPDLVTCLEQRKEPYNVKIHKIVARPPEFFHLYDNKPILAFWRIASEKSQSASVYRQLTHRSRAT

SEQ ID NO: 38478 - protein, 474 aa, Homo sapiens
  REGION 1..474: note = ENSP00000240499
MELLTFRDVAIEFSPEEWKCLDPDQQNLYRDVMLENYRNLVSLGVAISNPDLVTCLEQRKEPYNVKIHKIVARPPAMCSHFTQDHWPVQGIEDSFHKLILRRYEKCGHDNLQLRKGCKSLNECKLQKGGYNEFNECLSTTQSKILQCKASVKVVSKFSNSNKRKTRHTGEKHFKECGKSFQKFSHLTQHKVIHAGEKPYTCEECGKAFKWSLIFNEHKRIHTGEKPFTCEECGSIFTTSSHFAKHKIIHTGEKPYKCEECGKAFNRFTTLTKHKRIHAGEKPITCEECRKIFTSSSNFAKHKRIHTGEKPYKCEECGKAFNRSTTLTKHKRIHTGEKPYTCEECGKAFRQSSKLNEHKKVHTGERPYKCDECGKAFGRSRVLNEHKKIHTGEKPYKCEECGKAFRRSTDRSQHKKIHSADKPYKCKECDKAFKQFSLLSQHKKIHTVDKPYKCKDCDKAFKRFSHLNKHKKIHT

SEQ ID NO: 38479 - protein, 751 aa, Homo sapiens
  REGION 1..751: note = ENSP00000366636
MEDLSSPDSTLLQGGHNLLSSASFQEAVTFKDVIVDFTQEEWKQLDPGQRDLFRDVTLENYTHLVSIGLQVSKPDVISQLEQGTEPWIMEPSIPVGTCADWETRLENSVSAPEPDISEEELSPEVIVEKHKRDDSWSSNLLESWEYEGSLERQQANQQTLPKEIKVTEKTIPSWEKGPVNNEFGKSVNVSSNLVTQEPSPEETSTKRSIKQNSNPVKKEKSCKCNECGKAFSYCSALIRHQRTHTGEKPYKCNECEKAFSRSENLINHQRIHTGDKPYKCDQCGKGFIEGPSLTQHQRIHTGEKPYKCDECGKAFSQRTHLVQHQRIHTGEKPYTCNECGKAFSQRGHFMEHQKIHTGEKPFKCDECDKTFTRSTHLTQHQKIHTGEKTYKCNECGKAFNGPSTFIRHHMIHTGEKPYECNECGKAFSQHSNLTQHQKTHTGEKPYDCAECGKSFSYWSSLAQHLKIHTGEKPYKCNECGKAFSYCSSLTQHRRIHTREKPFECSECGKAFSYLSNLNQHQKTHTQEKAYECKECGKAFIRSSSLAKHERIHTGEKPYQCHECGKTFSYGSSLIQHRKIHTGERPYKCNECGRAFNQNIHLTQHKRIHTGAKPYECAECGKAFRHCSSLAQHQKTHTEEKPYQCNKCEKTFSQSSHLTQHQRIHTGEKPYKCNECDKAFSRSTHLTEHQNTHTGEKPYNCNECRKTFSQSTYLIQHQRIHSGEKPFGCNDCGKSFRYRSALNKHQRLHPGI

SEQ ID NO: 38480 - protein, 751 aa, Homo sapiens; identical to SEQ ID NO: 38479
  REGION 1..751: note = ENSP00000211936

SEQ ID NO: 38481 - protein, 495 aa, Homo sapiens
  REGION 1..495: note = ENSP00000338572
MAESAPARHRRKRRSTPLTSSTLPSQATEKSSYFQTTEISLWTVVAAIQAVEKKMESQAARLQSLEGRTGTAEKKLADCEKMAVEFGNQLEGKWAVLGTLLQEYGLLQRRLENVENLLRNRNFWILRLPPGSKGEAPKVSRSLENDGVCFTEQEWENLEDWQKELYRNVMESNYETLVSLKVLGQTEGEAELGTEMLGDLEEEGPGGAHPAGGVMIKQELQYTQEGPADLPGEFSCIAEEQAFLSPEQTELWGGQGSSVLLETGPGDSTLEEPVGSRVPSSSRTVGCPKQKSHRQVQLDQECGQGLKLKKDTSRPYECSECEITFRYKQQLATHLRSHSGWGSCTPEEPEESLRPRPRLKPQTKKAKLHQCDVCLRSFSCKVSLVTHQRCHLQEGPSAGQHVQERFSPNSLVALPGHIPWRKSRSSLICGYCGKSFSHPSDLVRHQRIHTGERPYSCTECEKSFVQKQHLLQHQKIHQRERGGLALEPGRPNGLL

SEQ ID NO: 38482 - protein, 50 aa, Homo sapiens
  REGION 1..50: note = ENSP00000418281
MAESAPARVKRHRRAGSRARWGWRSPLPGAGLRGLDAAGVLVSRGCRWRG

SEQ ID NO: 38483 - protein, 50 aa, Homo sapiens; identical to SEQ ID NO: 38482
  REGION 1..50: note = ENSP00000418167

SEQ ID NO: 38484 - protein, 194 aa, Homo sapiens
  REGION 1..194: note = ENSP00000419419
  VARIANT 1: note = Any amino acid
XYGLLQRRLENVENLLRNRNFWILRLPPGSKGEAPKVSRSLENDGVCFTEQEWENLEDWQKELYRNVMESNYETLVSLSSSDSPASASRVAEITEVLGQTEGEAELGTEMLGDLEEEGPGGAHPAGGVMIKQELQYTQEGPADLPGEFSCIAEEQAFLSPEQTELWGGQGSSVLLETGPGDSTLEEPVGSRVPS

SEQ ID NO: 38485 - protein, 69 aa, Homo sapiens
  REGION 1..69: note = ENSP00000419261
  VARIANT 1: note = Any amino acid
XCFTEQEWENLEDWQKELYRNVMESNYETLVSLKSCSIAQAGVQWHNLGSLQPLPHRFKRFSCLSLSSS

SEQ ID NO: 38486 - protein, 722 aa, Homo sapiens
  REGION 1..722: note = ENSP00000354206
MEGSRPRAPSGHLAPSPPAFDGELDLQRYSNGPAVSAGSLGMGAVSWSESRAGERRFPCPVCGKRFRFNSILALHLRAHPGAQAFQCPHCGHRAAQRALLRSHLRTHQPERPRSPAARLLLELEERALLREARLGRARSSGGMQATPATEGLARPQAPSSSAFRCPYCKGKFRTSAERERHLHILHRPWKCGLCSFGSSQEEELLHHSLTAHGAPERPLAATSAAPPPQPQPQPPPQPEPRSVPQPEPEPEPEREATPTPAPAAPEEPPAPPEFRCQVCGQSFTQSWFLKGHMRKHKASFDHACPVCGRCFKEPWFLKNHMKVHASKLGPLRAPGPASGPARAPQPPDLGLLAYEPLGPALLLAPAPTPAERREPPSLLGYLSLRAGEGRPNGEGAEPGPGRSFGGFRPLSSALPARARRHRAEEPEEEEEVVEAEEETWARGRSLGSLASLHPRPGEGPGHSASAAGAQARSTATQEENGLLVGGTRPEGGRGATGKDCPFCGKSFRSAHHLKVHLRVHTGERPYKCPHCDYAGTQSGSLKYHLQRHHREQRSGAGPGPPPEPPPPSQRGSAPQSGAKPSPQPATWVEGASSPRPPSSGAGPGSRRKPASPGRTLRNGRGGEAEPLDLSLRAGPGGEAGPGGALHRCLFCPFATGAPELMALHLQVHHSRRARGRRPPQADASPPYARVPSGETPPSPSQEGEEGSGLSRPGEAGLGGQER

SEQ ID NO: 38487 - protein, 722 aa, Homo sapiens; identical to SEQ ID NO: 38486
  REGION 1..722: note = ENSP00000388558

SEQ ID NO: 38488 - protein, 722 aa, Homo sapiens; identical to SEQ ID NO: 38486
  REGION 1..722: note = ENSP00000392401

SEQ ID NO: 38489 - protein, 211 aa, Homo sapiens
  REGION 1..211: note = ENSP00000450803
MEGSRPRAPSGHLAPSPPAFDGELDLQRYSNGPAVSAGSLGMGAVSWSESRAGERRFPCPVCGKRFRFNSILALHLRAHPGAQAFQCPHCGHRAAQRALLRSHLRTHQPERPRSPAARLLLELEERALLREARLGRARSSGGMQATPATEGLARPQAPSSSAFRCPYCKGKFRTSAERERHLHILHRPWKCGLCSFGSSQEEELLHHSLTA

SEQ ID NO: 38490 - protein, 158 aa, Homo sapiens
  REGION 1..158: note = ENSP00000451212
MLGQKERQSQLLPCSTAPVAFISSFSSSSLHFPEPKNVKGVHGDLSPQGSRPRAPSGHLAPSPPAFDGELDLQRYSNGPAVSAGSLGMGAVSWSESRAGERRFPCPVCGKRFRFNSILALHLRAHPGAQAFQCPHCGHRAAQRALLRSHLRTHQPERP

SEQ ID NO: 38491 - protein, 111 aa, Homo sapiens
  REGION 1..111: note = ENSP00000450609
MEGSRPRAPSGHLAPSPPAFDGELDLQRYSNGPAVSAGSLGMGAVSWSESRAGERRFPCPVCGKRFRFNSILALHLRAHPGAQAFQCPHCGHRAAQRALLRSHLRTHQPER

SEQ ID NO: 38492 - protein, 145 aa, Homo sapiens
  REGION 1..145: note = ENSP00000451890
MNPIRSTAPVAFISSFSSSSLHFPEPKNVKGVHGDLSPQGSRPRAPSGHLAPSPPAFDGELDLQRYSNGPAVSAGSLGMGAVSWSESRAGERRFPCPVCGKRFRFNSILALHLRAHPGAQAFQCPHCGHRAAQRALLRSHLRTHQ

SEQ ID NO: 38493 - protein, 107 aa, Homo sapiens
  REGION 1..107: note = ENSP00000450900
MEGSRPRAPSGHLAPSPPAFDGELDLQRYSNGPAVSAGSLGMGAVSWSESRAGERRFPCPVCGKRFRFNSILALHLRAHPGAQAFQCPHCGHRAAQRALLRSHLRTH

SEQ ID NO: 38494 - protein, 57 aa, Homo sapiens
  REGION 1..57: note = ENSP00000451969
MGAVSWSESRAGERRFPCPVCGKRFRFNSILALHLRAHPGAQAFQCPHCGHRAAQRA

SEQ ID NO: 38495 - protein, 31 aa, Homo sapiens
  REGION 1..31: note = ENSP00000451595
MEGSRPRAPSGHLAPSPPAFDGELDLQRYSN

SEQ ID NO: 38496 - protein, 214 aa, Homo sapiens
  REGION 1..214: note = ENSP00000467235
MERHEMIAKPPVMSSHFAQDLWPENIQNSFQIGMLRRYEECRHDNLQLKKGCKSVGEHKVHKGGYNGLNQCLTTTQKEIFQCDKYGKVFHKFSNSNTYKTRHTGINLFKCIICGKAFKRSSTLTTHKKIHTGEKPYRCEECGKAFNQSANLTTHKRIHTGEKPYRCEECGKAFKQSSNLTTHKKIHTGEKPYKCEECGKAFNRSTDLTTHKIVH

SEQ ID NO: 38497 - protein, 499 aa, Homo sapiens
  REGION 1..499: note = ENSP00000468720
MGPLQFRDVAIEFSLEEWHCLDTAQRNLYRDVMLENYRNLVFLGIVVSKPDLVTCLEQGKKPLTMERHEMIAKPPVMSSHFAQDLWPENIQNSFQIGMLRRYEECRHDNLQLKKGCKSVGEHKVHKGGYNGLNQCLTTTQKEIFQCDKYGKVFHKFSNSNTYKTRHTGINLFKCIICGKAFKRSSTLTTHKKIHTGEKPYRCEECGKAFNQSANLTTHKRIHTGEKPYRCEECGKAFKQSSNLTTHKKIHTGEKPYKCEECGKAFNRSTDLTTHKIVHTGEKPYKCEECGKAFKHPSHVTTHKKIHTRGKPYNCEECGKSFKHCSNLTIHKRIHTGEKPYKCEECGKAFHLSSHLTTHKILHTGEKPYRCRECGKAFNHSTTLFSHEKIHTGEKPYKCDECGKTFTWPSILSKHKRTHTGEKPYKCEECGKSFTASSTLTTHKRIHTGEKPYKCEECGKAFNWSSDLNKHKKIHIERKPYIVKNVTDLLNVPPLLISIR

SEQ ID NO: 38498 - protein, 423 aa, Homo sapiens
  REGION 1..423: note = ENSP00000347868
MSSHFAQDLWPENIQNSFQIGMLRRYEECRHDNLQLKKGCKSVGEHKVHKGGYNGLNQCLTTTQKEIFQCDKYGKVFHKFSNSNTYKTRHTGINLFKCIICGKAFKRSSTLTTHKKIHTGEKPYRCEECGKAFNQSANLTTHKRIHTGEKPYRCEECGKAFKQSSNLTTHKKIHTGEKPYKCEECGKAFNRSTDLTTHKIVHTGEKPYKCEECGKAFKHPSHVTTHKKIHTRGKPYNCEECGKSFKHCSNLTIHKRIHTGEKPYKCEECGKAFHLSSHLTTHKILHTGEKPYRCRECGKAFNHSTTLFSHEKIHTGEKPYKCDECGKTFTWPSILSKHKRTHTGEKPYKCEECGKSFTASSTLTTHKRIHTGEKPYKCEECGKAFNWSSDLNKHKKIHIERKPYIVKNVTDLLNVPPLLISIR

SEQ ID NO: 38499 - protein, 274 aa, Homo sapiens
  REGION 1..274: note = ENSP00000492582
GPLQFRDVAIEFSLEEWHCLDTAQRNLYRDVMLENYRNLVFLGIVVSKPDLVTCLEQGKKPLTMERHEMIAKPPVMSSHFAQDLWPENIQNSFQIGMLRRYEECRHDNLQLKKGCKSVGEHKVHKGGYNGLNQCLTTTQKEIFQCDKYGKVFHKFSNSNTYKTRHTGINLFKCIICGKAFKRSSTLTTHKKIHTGEKPYRCEECGKAFNQSANLTTHKRIHTGEKPYKCEECGKAFNWSSDLNKHKKIHIERKPYIVKNVTDLLNVPPLLISIR

SEQ ID NO: 38500 - protein, 706 aa, Homo sapiens
  REGION 1..706: note = ENSP00000401642
MAAAVLMDRVQSCVTFEDVFVYFSREEWELLEEAQRFLYRDVMLENFALVATLAFIFPVPCSCAVGGGRKPWVPDRADITAATVKETYRGHGPAEWELEEGFWCEAEHEAPSEQSVSVEGVSQVRTAESGLFQKAHPCEMCDPLLKDILHLAEHQGSHLTQKLCTRGLCRRRFSFSANFYQHQKQHNGENCFRGDDGGASFVKSCTVHMLGRSFTCREEGMDLPDSSGLFQHQTTYNRVSPCRRTECMESFPHSSSLRQHQGDYDGQMLFSCGDEGKAFLDTFTLLDSQMTHAEVRPFRCLPCGNVFKEKSALINHRKIHSGEISHVCKECGKAFIHLHHLKMHQKFHTGKRHYTCSECGKAFSRKDTLVQHQRVHTGERSYDCSECGKAYSRSSHLVQHQRIHTGERPYKCNKCGKAFSRKDTLVQHQRFHTGERPYECSECGKFFSQSSHLIEHWRIHTGARPYECIECGKFFSHNSSLIKHRRVHTGARSYVCSKCGKAFGCKDTLVQHQIIHTGARPYECSECGKAFSRKDTLVQHQKIHTGERPYECGECGKFFSHSSNLIVHQRIHTGAKPYECNECGKCFSHNSSLILHQRVHTGARPYVCSECGKAYISSSHLVQHKKVHTGARPYECSECGKFFSRNSGLILHQRVHTGEKPYVCSECGKAYSRSSHLVRHQKAHTGERAHECNSFGGPLAASLKLV

SEQ ID NO: 38501 - protein, 617 aa, Homo sapiens
  REGION 1..617: note = ENSP00000470319
MLENFALVATLGFWCEAEHEAPSEQSVSVEGVSQVRTAESGLFQKAHPCEMCDPLLKDILHLAEHQGSHLTQKLCTRGLCRRRFSFSANFYQHQKQHNGENCFRGDDGGASFVKSCTVHMLGRSFTCREEGMDLPDSSGLFQHQTTYNRVSPCRRTECMESFPHSSSLRQHQGDYDGQMLFSCGDEGKAFLDTFTLLDSQMTHAEVRPFRCLPCGNVFKEKSALINHRKIHSGEISHVCKECGKAFIHLHHLKMHQKFHTGKRHYTCSECGKAFSRKDTLVQHQRVHTGERSYDCSECGKAYSRSSHLVQHQRIHTGERPYKCNKCGKAFSRKDTLVQHQRFHTGERPYECSECGKFFSQSSHLIEHWRIHTGARPYECIECGKFFSHNSSLIKHRRVHTGARSYVCSKCGKAFGCKDTLVQHQIIHTGARPYECSECGKAFSRKDTLVQHQKIHTGERPYECGECGKFFSHSSNLIVHQRIHTGAKPYECNECGKCFSHNSSLILHQRVHTGARPYVCSECGKAYISSSHLVQHKKVHTGARPYECSECGKFFSRNSGLILHQRVHTGEKPYVCSECGKAYSRSSHLVRHQKAHTGERAHECNSFGGPLAASLKLV

SEQ ID NO: 38502 - protein, 659 aa, Homo sapiens
  REGION 1..659: note = ENSP00000282286
MAAAVLMDRVQSCVTFEDVFVYFSREEWELLEEAQRFLYRDVMLENFALVATLGFWCEAEHEAPSEQSVSVEGVSQVRTAESGLFQKAHPCEMCDPLLKDILHLAEHQGSHLTQKLCTRGLCRRRFSFSANFYQHQKQHNGENCFRGDDGGASFVKSCTVHMLGRSFTCREEGMDLPDSSGLFQHQTTYNRVSPCRRTECMESFPHSSSLRQHQGDYDGQMLFSCGDEGKAFLDTFTLLDSQMTHAEVRPFRCLPCGNVFKEKSALINHRKIHSGEISHVCKECGKAFIHLHHLKMHQKFHTGKRHYTCSECGKAFSRKDTLVQHQRVHTGERSYDCSECGKAYSRSSHLVQHQRIHTGERPYKCNKCGKAFSRKDTLVQHQRFHTGERPYECSECGKFFSQSSHLIEHWRIHTGARPYECIECGKFFSHNSSLIKHRRVHTGARSYVCSKCGKAFGCKDTLVQHQIIHTGARPYECSECGKAFSRKDTLVQHQKIHTGERPYECGECGKFFSHSSNLIVHQRIHTGAKPYECNECGKCFSHNSSLILHQRVHTGARPYVCSECGKAYISSSHLVQHKKVHTGARPYECSECGKFFSRNSGLILHQRVHTGEKPYVCSECGKAYSRSSHLVRHQKAHTGERAHECNSFGGPLAASLKLV

SEQ ID NO: 38503 - protein, 659 aa, Homo sapiens; identical to SEQ ID NO: 38502
  REGION 1..659: note = ENSP00000375586

SEQ ID NO: 38504 - protein, 463 aa, Homo sapiens
  REGION 1..463: note = ENSP00000253144
MAQGLVTFADVAIDFSQEEWACLNSAQRDLYWDVMLENYSNLVSLDLESAYENKSLPTEKNIHEIRASKRNSDRRSKSLGRNWICEGTLERPQRSRGRYVNQMIINYVKRPATREGTPPRTHQRHHKENSFECKDCGKAFSRGYQLSQHQKIHTGEKPYECKECKKAFRWGNQLTQHQKIHTGEKPYECKDCGKAFRWGSSLVIHKRIHTGEKPYECKDCGKAFRRGDELTQHQRFHTGEKDYECKDCGKTFSRVYKLIQHKRIHSGEKPYECKDCGKAFICGSSLIQHKRIHTGEKPYECQECGKAFTRVNYLTQHQKIHTGEKPHECKECGKAFRWGSSLVKHERIHTGEKPYKCTECGKAFNCGYHLTQHERIHTGETPYKCKECGKAFIYGSSLVKHERIHTGVKPYGCTECGKSFSHGHQLTQHQKTHSGAKSYECKECGKACNHLNHLREHQRIHNS

SEQ ID NO: 38505 - protein, 63 aa, Homo sapiens
  REGION 1..63: note = ENSP00000423675
MAQGLVTFADVAIDFSQEEWACLNSAQRDLYWDVMLENYSNLVSLDLESAYENKSLPTEKNIH

SEQ ID NO: 38506 - protein, 463 aa, Homo sapiens; identical to SEQ ID NO: 38504
  REGION 1..463: note = ENSP00000427439

SEQ ID NO: 38507 - protein, 99 aa, Homo sapiens
  REGION 1..99: note = ENSP00000424835
MAQGLVTFADVAIDFSQEEWACLNSAQRDLYWDVMLENYSNLVSLDLESAYENKSLPTEKNIHEIRASKRNSDRRSKSLGRNWICEGTLERPQRSRGRY

SEQ ID NO: 38508 - protein, 463 aa, Homo sapiens; identical to SEQ ID NO: 38504
  REGION 1..463: note = ENSP00000393336

SEQ ID NO: 38509 - protein, 463 aa, Homo sapiens; identical to SEQ ID NO: 38504
  REGION 1..463: note = ENSP00000421014

SEQ ID NO: 38510 - protein, 86 aa, Homo sapiens
  REGION 1..86: note = ENSP00000423263
MAQGLVTFADVAIDFSQEEWACLNSAQRDLYWDVMLENYSNLVSLDLESAYENKSLPTEKNIHEIRASKRNSDRRSKSLGRNWICE

SEQ ID NO: 38511 - protein, 47 aa, Homo sapiens
  REGION 1..47: note = ENSP00000426155
MAQGLVTFADVAIDFSQEEWACLNSAQRDLYWDVMLENYSNLVSLDL

SEQ ID NO: 38512 - protein, 463 aa, Homo sapiens; identical to SEQ ID NO: 38504
  REGION 1..463: note = ENSP00000423156

SEQ ID NO: 38513 - protein, 463 aa, Homo sapiens; identical to SEQ ID NO: 38504
  REGION 1..463: note = ENSP00000421728

SEQ ID NO: 38514 - protein, 105 aa, Homo sapiens
  REGION 1..105: note = ENSP00000426127
MAQGLVTFADVAIDFSQEEWACLNSAQRDLYWDVMLENYSNLVSLDLESAYENKSLPTEKNIHEIRASKRNSDRRSKSLGRNWICEGTLERPQRSRGRYVNQMII

SEQ ID NO: 38515 - protein, 166 aa, Homo sapiens
  REGION 1..166: note = ENSP00000422471
MAQGLVTFADVAIDFSQEEWACLNSAQRDLYWDVMLENYSNLVSLDLESAYENKSLPTEKNIHEIRASKRNSDRRSKSLGRNWICEGTLERPQRSRGRYVNQMIINYVKRPATREGTPPRTHQRHHKENSFECKDCGKAFSRGYQLSQHQKIHTGEKPYECKECKK

SEQ ID NO: 38516 - protein, 177 aa, Homo sapiens
  REGION 1..177: note = ENSP00000427532
MAQGLVTFADVAIDFSQEEWACLNSAQRDLYWDVMLENYSNLVSLDLESAYENKSLPTEKNIHEIRASKRNSDRRSKSLGRNWICEGTLERPQRSRGRYVNQMIINYVKRPATREGTPPRTHQRHHKENSFECKDCGKAFSRGYQLSQHQKIHTGEKPYECKECKKAFRWGNQLTQH

SEQ ID NO: 38517 - protein, 98 aa, Homo sapiens
  REGION 1..98: note = ENSP00000426458
MAQGLVTFADVAIDFSQEEWACLNSAQRDLYWDVMLENYSNLVSLDLESAYENKSLPTEKNIHEIRASKRNSDRRSKSLGRNWICEGTLERPQRSRGR

SEQ ID NO: 38518 - protein, 85 aa, Homo sapiens
  REGION 1..85: note = ENSP00000422586
MAQGLVTFADVAIDFSQEEWACLNSAQRDLYWDVMLENYSNLVSLDLESAYENKSLPTEKNIHEIRASKRNSDRRSKSLGRNWIC

SEQ ID NO: 38519 - protein, 66 aa, Homo sapiens
  REGION 1..66: note = ENSP00000425517
MAQGLVTFADVAIDFSQEEWACLNSAQRDLYWDVMLENYSNLVSLDLESAYENKSLPTEKNIHEIR

SEQ ID NO: 38520 - protein, 64 aa, Homo sapiens
  REGION 1..64: note = ENSP00000424929
MAQGLVTFADVAIDFSQEEWACLNSAQRDLYWDVMLENYSNLVSLDLESAYENKSLPTEKNIHE

SEQ ID NO: 38521 - protein, 463 aa, Homo sapiens; identical to SEQ ID NO: 38504
  REGION 1..463: note = ENSP00000393817

SEQ ID NO: 38522 - protein, 552 aa, Homo sapiens
  REGION 1..552: note = ENSP00000466051
MARVPLTFSDVAIDFSQEEWEYLNSDQRDLYRDVMLENYTNLVSLDFNFTTESNKLSSEKRNYEVNAYHQETWKRNKTFNLMRFIFRTDPQYTIEFGRQQRPKVGCFSQMIFKKHKSLPLHKRNNTREKSYECKEYKKGFRKYLHLTEHLRDHTGVIPYECNECGKAFVVFQHFIRHRKIHTDLKPYECNGCEKAFRFYSQLIQHQIIHTGMKPYECKQCGKAFRRHSHLTEHQKIHVGLKPFECKECGETFRLYRHMCLHQKIHHGVKPYKCKECGKAFGHRSSLYQHKKIHSGEKPYKCEQCEKAFVRSYLLVEHQRSHTGEKPHECMECGKAFGKGSSLLKHKRIHSSEKLYDCKDCGKAFCRGSQLTQHQRIHTGEKPHECKECGKTFKLHSYLIQHQIIHTDLKPYECKQCGKAFSRVGDLKTHQSIHAGEKPYECKECGKTFRLNSQLIYHQTIHTGLKPYVCKECKKAFRSISGLSQHKRIHTGEKPYECKECDKAFNRSDRLTQHETIHTGVKPQKCKECGKAFSHCYQLSQHQRFHHGERLLM

SEQ ID NO: 38523 - protein, 551 aa, Homo sapiens
  REGION 1..551: note = ENSP00000319479
FQVPLTFSDVAIDFSQEEWEYLNSDQRDLYRDVMLENYTNLVSLDFNFTTESNKLSSEKRNYEVNAYHQETWKRNKTFNLMRFIFRTDPQYTIEFGRQQRPKVGCFSQMIFKKHKSLPLHKRNNTREKSYECKEYKKGFRKYLHLTEHLRDHTGVIPYECNECGKAFVVFQHFIRHRKIHTDLKPYECNGCEKAFRFYSQLIQHQIIHTGMKPYECKQCGKAFRRHSHLTEHQKIHVGLKPFECKECGETFRLYRHMCLHQKIHHGVKPYKCKECGKAFGHRSSLYQHKKIHSGEKPYKCEQCEKAFVRSYLLVEHQRSHTGEKPHECMECGKAFGKGSSLLKHKRIHSSEKLYDCKDCGKAFCRGSQLTQHQRIHTGEKPHECKECGKTFKLHSYLIQHQIIHTDLKPYECKQCGKAFSRVGDLKTHQSIHAGEKPYECKECGKTFRLNSQLIYHQTIHTGLKPYVCKECKKAFRSISGLSQHKRIHTGEKPYECKECDKAFNRSDRLTQHETIHTGVKPQKCKECGKAFSHCYQLSQHQRFHHGERLLM

SEQ ID NO: 38524 - protein, 587 aa, Homo sapiens
  REGION 1..587: note = ENSP00000294753
MPTALCPRVLAPKESEEPRKMRSPPGENPSPQGELPSPESSRRLFRRFRYQEAAGPREALQRLWDLCGGWLRPERHTKEQILELLVLEQFLAILPREIQSWVRAQEPESGEQAVAAVEALEREPGRPWQWLKHCEDPVVIDDGDSPLDQEQEQLPVEPHSDLAKNQDAQPITLAQCLGLPSRPPSQLSGDPVLQDAFLLQEENVRDTQQVTTLQLPPSRVSPFKDMILCFSEEDWSLLDPAQTGFYGEFIIGEDYGVSMPPNDLAAQPDLSQGEENEPRVPELQDLQGKEVPQVSYLDSPSLQPFQVEERRKREELQVPEFQACPQTVVPQNTYPAGGNPRSLENSLDEEVTIEIVLSSSGDEDSQHGPYCTEELGSPTEKQRSLPASHRSSTEAGGEVQTSKKSYVCPNCGKIFRWRVNFIRHLRSRREQEKPHECSVCGELFSDSEDLDGHLESHEAQKPYRCGACGKSFRLNSHLLSHRRIHLQPDRLQPVEKREQAASEDADKGPKEPLENGKAKLSFQCCECGKAFQRHDHLARHRSHFHLKDKARPFQCRYCVKSFTQNYDLLRHERLHMKRRSKQALNSY

SEQ ID NO: 38525 - protein, 512 aa, Homo sapiens
  REGION 1..512: note = ENSP00000473324
QAVAAVEALEREPGRPWQWLKHCEDPVVIDDGDSPLDQEQEQLPVEPHSDLAKNQDAQPITLAQCLGLPSRPPSQLSGDPVLQDAFLLQEENVRDTQQVTTLQLPPRIFQFNNHRSNGYILEMLGSGGKKAQIISVLSQIYVSRVSPFKDMILCFSEEDWSLLDPAQTGFYGEFIIGEDYGVSMPPNDLAAQPDLSQGEENEPRVPELQDLQGKEVPQVSYLDSPSLQPFQVEERRKREELQVPEFQACPQTVVPQNTYPAGGNPRSLENSLDEEVTIEIVLSSSGDEDSQHGPYCTEELGSPTEKQRSLPASHRSSTEAGGEVQTSKKSYVCPNCGKIFRWRVNFIRHLRSRREQEKPHECSVCGELFSDSEDLDGHLESHEAQKPYRCGACGKSFRLNSHLLSHRRIHLQPDRLQPVEKREQAASEDADKGPKEPLENGKAKLSFQCCECGKAFQRHDHLARHRSHFHLKDKARPFQCRYCVKSFTQNYDLLRHERLHMKRRSKQALNSY

SEQ ID NO: 38526 - protein, 139 aa, Homo sapiens
  REGION 1..139: note = ENSP00000469334
MEETQGELTSSCGSKTMANVSLAFRDVSIDLSQEEWECLDAVQRDLYKDVMLENYSNLVSLGYTIPKPDVITLLEQEKEPWIVMREGTRNWFTDLEYKYITKNLLSEKNVCKIYLSQLQTGEKSKNTIHEDTIFRNGLQ

SEQ ID NO: 38527 - protein, 37 aa, Homo sapiens
  REGION 1..37: note = ENSP00000470423
MQSLVLLPRLECSDVILAYCNLHLPGKLHEPKWQRLQ

SEQ ID NO: 38528 - protein, 126 aa, Homo sapiens
  REGION 1..126: note = ENSP00000469168
MEETQGELTSSCGSKTMANVSLAFRDVSIDLSQEEWECLDAVQRDLYKDVMLENYSNLVSLGYTIPKPDVITLLEQEKEPWIVMREGTRNWFTESRSVTQAGVQWHNLGSLQPPPPGFKQFFCLSL

SEQ ID NO: 38529 - protein, 810 aa, Homo sapiens
  REGION 1..810: note = ENSP00000469540
MQPRFLWILCFSMEETQGELTSSCGSKTMANVSLAFRDVSIDLSQEEWECLDAVQRDLYKDVMLENYSNLVSLGYTIPKPDVITLLEQEKEPWIVMREGTRNWFTDLEYKYITKNLLSEKNVCKIYLSQLQTGEKSKNTIHEDTIFRNGLQCKHEFERQERHQMGCVSQMLIQKQISHPLHPKIHAREKSYECKECRKAFRQQSYLIQHLRIHTGERPYKCMECGKAFCRVGDLRVHHTIHAGERPYECKECGKAFRLHYHLTEHQRIHSGVKPYECKECGKAFSRVRDLRVHQTIHAGERPYECKECGKAFRLHYQLTEHQRIHTGERPYECKVCGKTFRVQRHISQHQKIHTGVKPYKCNECGKAFSHGSYLVQHQKIHTGEKPYECKECGKSFSFHAELARHRRIHTGEKPYECRECGKAFRLQTELTRHHRTHTGEKPYECKECGKAFICGYQLTLHLRTHTGEIPYECKECGKTFSSRYHLTQHYRIHTGEKPYICNECGKAFRLQGELTRHHRIHTCEKPYECKECGKAFIHSNQFISHQRIHTSESTYICKECGKIFSRRYNLTQHFKIHTGEKPYICNECGKAFRFQTELTQHHRIHTGEKPYKCTECGKAFIRSTHLTQHHRIHTGEKPYECTECGKTFSRHYHLTQHHRGHTGEKPYICNECGNAFICSYRLTLHQRIHTGELPYECKECGKTFSRRYHLTQHFRLHTGEKPYSCKECGNAFRLQAELTRHHIVHTGEKPYKCKECGKAFSVNSELTRHHRIHTGEKPYQCKECGKAFIRSDQLTLHQRNHISEEVLCIM

SEQ ID NO: 38530 - protein, 836 aa, Homo sapiens
  REGION 1..836: note = ENSP00000339823
MQVDPPLHGPPNDFLIFQIIPLHSLSIMPRFLWILCFSMEETQGELTSSCGSKTMANVSLAFRDVSIDLSQEEWECLDAVQRDLYKDVMLENYSNLVSLGYTIPKPDVITLLEQEKEPWIVMREGTRNWFTDLEYKYITKNLLSEKNVCKIYLSQLQTGEKSKNTIHEDTIFRNGLQCKHEFERQERHQMGCVSQMLIQKQISHPLHPKIHAREKSYECKECRKAFRQQSYLIQHLRIHTGERPYKCMECGKAFCRVGDLRVHHTIHAGERPYECKECGKAFRLHYHLTEHQRIHSGVKPYECKECGKAFSRVRDLRVHQTIHAGERPYECKECGKAFRLHYQLTEHQRIHTGERPYECKVCGKTFRVQRHISQHQKIHTGVKPYKCNECGKAFSHGSYLVQHQKIHTGEKPYECKECGKSFSFHAELARHRRIHTGEKPYECRECGKAFRLQTELTRHHRTHTGEKPYECKECGKAFICGYQLTLHLRTHTGEIPYECKECGKTFSSRYHLTQHYRIHTGEKPYICNECGKAFRLQGELTRHHRIHTCEKPYECKECGKAFIHSNQFISHQRIHTSESTYICKECGKIFSRRYNLTQHFKIHTGEKPYICNECGKAFRFQTELTQHHRIHTGEKPYKCTECGKAFIRSTHLTQHHRIHTGEKPYECTECGKTFSRHYHLTQHHRGHTGEKPYICNECGNAFICSYRLTLHQRIHTGELPYECKECGKTFSRRYHLTQHFRLHTGEKPYSCKECGNAFRLQAELTRHHIVHTGEKPYKCKECGKAFSVNSELTRHHRIHTGEKPYQCKECGKAFIRSDQLTLHQRNHISEEVLCIM

SEQ ID NO: 38531 - protein, 124 aa, Homo sapiens
  REGION 1..124: note = ENSP00000472403
MQVDPPLHGPPNDFLIFQIIPLHSLSIMPRFLWILCFSMEETQGELTSSCGSKTMANVSLAFRDVSIDLSQEEWECLDAVQRDLYKDVMLENYSNLVSLGYTIPKPDVITLLEQEKEPWIVMRE

SEQ ID NO: 38532 - protein, 139 aa, Homo sapiens; identical to SEQ ID NO: 38526
  REGION 1..139: note = ENSP00000486015

SEQ ID NO: 38533 - protein, 37 aa, Homo sapiens; identical to SEQ ID NO: 38527
  REGION 1..37: note = ENSP00000487382

SEQ ID NO: 38534 - protein, 126 aa, Homo sapiens; identical to SEQ ID NO: 38528
  REGION 1..126: note = ENSP00000486807

SEQ ID NO: 38535 - protein, 810 aa, Homo sapiens; identical to SEQ ID NO: 38529
  REGION 1..810: note = ENSP00000487351

SEQ ID NO: 38536 - protein, 836 aa, Homo sapiens; identical to SEQ ID NO: 38530
  REGION 1..836: note = ENSP00000487125

SEQ ID NO: 38537 - protein, 124 aa, Homo sapiens; identical to SEQ ID NO: 38531
  REGION 1..124: note = ENSP00000486294

SEQ ID NO: 38538 - protein, 103 aa, Homo sapiens
  REGION 1..103: note = ENSP00000468407
MLLLPPRPPHPRSSSPEAMDPPPPKAPPFPKAEGPSSTPSSAAGPRPPRLGRHLLIDANGVPYTYTVQLEEEPRGPPQREAPPGEPGPRKGYSCPECARVFAS

SEQ ID NO: 38539 - protein, 172 aa, Homo sapiens
  REGION 1..172: note = ENSP00000320050
MLLLPPRPPHPRSSSPEAMDPPPPKAPPFPKAEGPSSTPSSAAGPRPPRLGRHLLIDANGVPYTYTVQLEEEPRGPPQREAPPGEPGPRKGYSCPECARVFASPLRLQSHRVSHSDLKPFTCGACGKAFKRSSHLSRHRATHRARAGPPHTCPLCPRRFQDAAELAQHVRLH

SEQ ID NO: 38540 - protein, 22 aa, Homo sapiens
  REGION 1..22: note = ENSP00000465028
MLLLPPRPPHPRSSSPEAMDPP

SEQ ID NO: 38541 - protein, 172 aa, Homo sapiens; identical to SEQ ID NO: 38539
  REGION 1..172: note = ENSP00000443957

SEQ ID NO: 38542 - protein, 104 aa, Homo sapiens
  REGION 1..104: note = ENSP00000467142
MLLLPPRPPHPRSSSPEAMDPPPPKAPPFPKAEGPSSTPSSAAGPRPPRLGRHLLIDANGVPYTYTVQLEEEPRGPPQREAPPGEPGPRKGYSCPECARVFASP

SEQ ID NO: 38543 - protein, 172 aa, Homo sapiens; identical to SEQ ID NO: 38539
  REGION 1..172: note = ENSP00000446126

SEQ ID NO: 38544 - protein, 113 aa, Homo sapiens
  REGION 1..113: note = ENSP00000466825
MPANWTSPQKSSALAPEDHGSSYEGSVSFRDVAIDFSREEWRHLDPSQRNLYRDVMLETYSHLLSVGYQVPEAEVVMLEQGKEPWALQGERPRQSCPAPCLVNSHHLQESFRG

SEQ ID NO: 38545 - protein, 769 aa, Homo sapiens
  REGION 1..769: note = ENSP00000292841
MPANWTSPQKSSALAPEDHGSSYEGSVSFRDVAIDFSREEWRHLDPSQRNLYRDVMLETYSHLLSVGYQVPEAEVVMLEQGKEPWALQGERPRQSCPGEKLWDHNQCRKILSYKQVSSQPQKMYPGEKAYECAKFEKIFTQKSQLKVHLKVLAGEKLYVCIECGKAFVQKPEFIIHQKTHMREKPFKCNECGKSFFQVSSLFRHQRIHTGEKLYECSQCGKGFSYNSDLSIHEKIHTGERHHECTDCGKAFTQKSTLKMHQKIHTGERSYICIECGQAFIQKTHLIAHRRIHTGEKPYECSNCGKSFISKSQLQVHQRVHTRVKPYICTEYGKVFSNNSNLVTHKKVQSREKSSICTECGKAFTYRSELIIHQRIHTGEKPYECSDCGKAFTQKSALTVHQRIHTGEKSYICMKCGLAFIQKAHLIAHQIIHTGEKPHKCGHCGKLFTSKSQLHVHKRIHTGEKPYMCNKCGKAFTNRSNLITHQKTHTGEKSYICSKCGKAFTQRSDLITHQRIHTGEKPYECNTCGKAFTQKSHLNIHQKIHTGERQYECHECGKAFNQKSILIVHQKIHTGEKPYVCTECGRAFIRKSNFITHQRIHTGEKPYECSDCGKSFTSKSQLLVHQPVHTGEKPYVCAECGKAFSGRSNLSKHQKTHTGEKPYICSECGKTFRQKSELITHHRIHTGEKPYECSDCGKSFTKKSQLQVHQRIHTGEKPYVCAECGKAFTDRSNLNKHQTTHTGDKPYKCGICGKGFVQKSVFSVHQSSHA

SEQ ID NO: 38546 - protein, 714 aa, Homo sapiens
  REGION 1..714: note = ENSP00000375998
MLETYSHLLSVGYQVPEAEVVMLEQGKEPWALQGERPRQSCPGEKLWDHNQCRKILSYKQVSSQPQKMYPGEKAYECAKFEKIFTQKSQLKVHLKVLAGEKLYVCIECGKAFVQKPEFIIHQKTHMREKPFKCNECGKSFFQVSSLFRHQRIHTGEKLYECSQCGKGFSYNSDLSIHEKIHTGERHHECTDCGKAFTQKSTLKMHQKIHTGERSYICIECGQAFIQKTHLIAHRRIHTGEKPYECSNCGKSFISKSQLQVHQRVHTRVKPYICTEYGKVFSNNSNLVTHKKVQSREKSSICTECGKAFTYRSELIIHQRIHTGEKPYECSDCGKAFTQKSALTVHQRIHTGEKSYICMKCGLAFIQKAHLIAHQIIHTGEKPHKCGHCGKLFTSKSQLHVHKRIHTGEKPYMCNKCGKAFTNRSNLITHQKTHTGEKSYICSKCGKAFTQRSDLITHQRIHTGEKPYECNTCGKAFTQKSHLNIHQKIHTGERQYECHECGKAFNQKSILIVHQKIHTGEKPYVCTECGRAFIRKSNFITHQRIHTGEKPYECSDCGKSFTSKSQLLVHQPVHTGEKPYVCAECGKAFSGRSNLSKHQKTHTGEKPYICSECGKTFRQKSELITHHRIHTGEKPYECSDCGKSFTKKSQLQVHQRIHTGEKPYVCAECGKAFTDRSNLNKHQTTHTGDKPYKCGICGKGFVQKSVFSVHQSSHA

SEQ ID NO: 38547 - protein, 25 aa, Homo sapiens
  REGION 1..25: note = ENSP00000466185
MPANWTSPQKSSALAPEDHGSSYEC

SEQ ID NO: 38548 - protein, 714 aa, Homo sapiens; identical to SEQ ID NO: 38546
  REGION 1..714: note = ENSP00000349440

SEQ ID NO: 38549 - protein, 696 aa, Homo sapiens
  REGION 1..696: note = ENSP00000347338
MSYGSITFGDVAIDFSHQEWEYLSLVQKTLYQEVMMENYDNLVSLAGHSVSKPDLITLLEQGKEPWMIVREETRGECTDLDSRCEIISDGKMQLYRKHSCVTLHQRIHNGQKPYECKQCQKSFSHLTELMVHQTIHTSEEPDQCEKFRKAFSHLTDLRKHQKINAREKPYECEECGKVFSYPANLAQHGKVHVEKPYECKECGEAFRTSRQLTVHHRFHYGEKPYECKECGKAFSVYGRLSRHQSIHTGEKPFECNKCGKSFRLKAGLKVHQSIHTGEKPHECKECGKAFRQFSHLVGHKRIHTGEKPYECKECGKGFTCRYQLTMHQRIYSGEKHYECKENGEAFSSGHQLTAPHTFESVEKPYKCEECGKAFSVHGRLTRHQGIHSGKKPYECNKCGKSFRLNSSLKIHQNIHTGEKPYKCKECGKAFSQRAHLAHHNRIHTGYKPFECKECGKSFRCASYLVIHERIHTGEKPYVCQECGKGFSYSHKLTIHRRVHTGEKPYECKECGKAFSVSGQLTQHLSIHSGKKPFECNKCGKSFRFISVLKAHQNIHSAEKPYECKECGKAFRHATSLIYHDRTHAGEKSYECKECGETFSHASHLIIHERIHTSDKPYECKRCGKAFHCASYLVRHESVHADGNPYMCEECGKAFNSSHELSIHHRVHTGEKPFKCNKCRRSFRLRSILEVHQRIHI

SEQ ID NO: 38550 - protein, 695 aa, Homo sapiens
  REGION 1..695: note = ENSP00000438015
MSYGSITFGDVAIDFSHQEWEYLSLVQKTLYQEVMMENYDNLVSLGHSVSKPDLITLLEQGKEPWMIVREETRGECTDLDSRCEIISDGKMQLYRKHSCVTLHQRIHNGQKPYECKQCQKSFSHLTELMVHQTIHTSEEPDQCEKFRKAFSHLTDLRKHQKINAREKPYECEECGKVFSYPANLAQHGKVHVEKPYECKECGEAFRTSRQLTVHHRFHYGEKPYECKECGKAFSVYGRLSRHQSIHTGEKPFECNKCGKSFRLKAGLKVHQSIHTGEKPHECKECGKAFRQFSHLVGHKRIHTGEKPYECKECGKGFTCRYQLTMHQRIYSGEKHYECKENGEAFSSGHQLTAPHTFESVEKPYKCEECGKAFSVHGRLTRHQGIHSGKKPYECNKCGKSFRLNSSLKIHQNIHTGEKPYKCKECGKAFSQRAHLAHHNRIHTGYKPFECKECGKSFRCASYLVIHERIHTGEKPYVCQECGKGFSYSHKLTIHRRVHTGEKPYECKECGKAFSVSGQLTQHLSIHSGKKPFECNKCGKSFRFISVLKAHQNIHSAEKPYECKECGKAFRHATSLIYHDRTHAGEKSYECKECGETFSHASHLIIHERIHTSDKPYECKRCGKAFHCASYLVRHESVHADGNPYMCEECGKAFNSSHELSIHHRVHTGEKPFKCNKCRRSFRLRSILEVHQRIHI

SEQ ID NO: 38551 - protein, 102 aa, Homo sapiens
  REGION 1..102: note = ENSP00000466265
MSYGSITFGDVAIDFSHQEWEYLSLVQKTLYQEVMMENYDNLVSLGHSVSKPDLITLLEQGKEPWMIVREETRGECTAELQSKNCGFQLRDLQDSLHLRKNC

SEQ ID NO: 38552 - protein, 112 aa, Homo sapiens
  REGION 1..112: note = ENSP00000466785
MQLYRKHSCVTLHQRIHNGQKPYECKQCQKSFSHLTELMVHQTIHTSEEPDQCEKFRKAFSHLTDLRKHQKINAREKPYECEECGKVFSYPANLAQHGKVHVEKPYECKECG

SEQ ID NO: 38553 - protein, 70 aa, Homo sapiens
  REGION 1..70: note = ENSP00000468817
MSYGSITFGDVAIDFSHQEWEYLSLVQKTLYQEVMMENYDNLVSLDLDSRCEIISDGKMQLYRKHSCVTL

SEQ ID NO: 38554 - protein, 590 aa, Homo sapiens
  REGION 1..590: note = ENSP00000332325
MSDSPAGSNPRTPESSGSGSGGGGKRPAVPAAVSLLPPADPLRQANRLPIRVLKMLSAHTGHLLHPEYLQPLSSTPVSPIELDAKKSPLALLAQTCSQIGKPDPPPSSKLNSVAAAANGLGAEKDPGRSAPGAASAAAALKQLGDSPAEDKSSFKPYSKGSGGGDSRKDSGSSSVSSTSSSSSSSPGDKAGFRVPSAACPPFPPHGAPVSASSSSSSPGGSRGGSPHHSDCKNGGGVGGGELDKKDQEPKPSPEPAAVSRGGGGEPGAHGGAESGASGRKSEPPSALVGAGHVAPVSPYKPGHSVFPLPPSSIGYHGSIVGAYAGYPSQFVPGLDPSKSGLVGGQLSGGLGLPPGKPPSSSPLTGASPPSFLQGLCRDPYCLGGYHGASHLGGSSCSTCSAHDPAGPSLKAGGYPLVYPGHPLQPAALSSSAAQAALPGHPLYTYGFMLQNEPLPHSCNWVAASGPCDKRFATSEELLSHLRTHTALPGAEKLLAAYPGASGLGSAAAAAAAAASCHLHLPPPAAPGSPGSLSLRNPHTLGLSRYHPYGKSHLSTAGGLAVPSLPTAGPYYSPYALYGQRLASASALGYQ

SEQ ID NO: 38555 - protein, 761 aa, Homo sapiens
  REGION 1..761: note = ENSP00000362260
MDSGGGSLGLHTPDSRMAHTMIMQDFVAGMAGTAHIDGDHIVVSVPEAVLVSDVVTDDGITLDHGLAAEVVHGPDIITETDVVTEGVIVPEAVLEADVAIEEDLEEDDGDHILTSELITETVRVPEQVFVADLVTGPNGHLEHVVQDCVSGVDSPTMVSEEVLVTNSDTETVIQAAGGVPGSTVTIKTEDDDDDDVKSTSEDYLMISLDDVGEKLEHMGNTPLKIGSDGSQEDAKEDGFGSEVIKVYIFKAEAEDDVEIGGTEIVTESEYTSGHSVAGVLDQSRMQREKMVYMAVKDSSQEEDDIRDERRVSRRYEDCQASGNTLDSALESRSSTAAQYLQICDGINTNKVLKQKAKKRRRGETRQWQTAVIIGPDGQPLTVYPCHICTKKFKSRGFLKRHMKNHPDHLMRKKYQCTDCDFTTNKKVSFHNHLESHKLINKVDKTHEFTEYTRRYREASPLSSNKLILRDKEPKMHKCKYCDYETAEQGLLNRHLLAVHSKNFPHVCVECGKGFRHPSELKKHMRTHTGEKPYQCQYCIFRCADQSNLKTHIKSKHGNNLPYKCEHCPQAFGDERELQRHLDLFQGHKTHQCPHCDHKSTNSSDLKRHIISVHTKDFPHKCEVCDKGFHRPSELKKHSDIHKGRKIHQCRHCDFKTSDPFILSGHILSVHTKDQPLKCKRCKRGFRQQNELKKHMKTHTGRKIYQCEYCEYSTTDASGFKRHVISIHTKDYPHRCEFCKKGFRRPSEKNQHIMRHHKEALM

SEQ ID NO: 38556 - protein, 761 aa, Homo sapiens; identical to SEQ ID NO: 38555
  REGION 1..761: note = ENSP00000276123

SEQ ID NO: 38557 - protein, 807 aa, Homo sapiens
  REGION 1..807: note = ENSP00000353922
MDSGGGSLGLHTPDSRMAHTMIMQDFVAGMAGTAHIDGDHIVVSVPEAVLVSDVVTDDGITLDHGLAAEVVHGPDIITETDVVTEGVIVPEAVLEADVAIEEDLEEDDGDHILTSELITETVRVPEQVFVADLVTGPNGHLEHVVQDCVSGVDSPTMVSEEVLVTNSDTETVIQAAGGVPGSTVTIKTEDDDDDDVKSTSEDYLMISLDDVGEKLEHMGNTPLKIGSDGSQEDAKEDGFGSEVIKVYIFKAEAEDDVEIGGTEIVTESEYTSGHSVAGVLDQSRMQREKMVYMAVKDSSQEEDDISCAEIADEVYMEVIVGEEEGTSLPEIQLEDSDVNKTVVPVVWAAAYGDERRVSRRYEDCQASGNTLDSALESRSSTAAQYLQICDGINTNKVLKQKAKKRRRGETRQWQTAVIIGPDGQPLTVYPCHICTKKFKSRGFLKRHMKNHPDHLMRKKYQCTDCDFTTNKKVSFHNHLESHKLINKVDKTHEFTEYTRRYREASPLSSNKLILRDKEPKMHKCKYCDYETAEQGLLNRHLLAVHSKNFPHVCVECGKGFRHPSELKKHMRTHTGEKPYQCQYCIFRCADQSNLKTHIKSKHGNNLPYKCEHCPQAFGDERELQRHLDLFQGHKTHQCPHCDHKSTNSSDLKRHIISVHTKDFPHKCEVCDKGFHRPSELKKHSDIHKGRKIHQCRHCDFKTSDPFILSGHILSVHTKDQPLKCKRCKRGFRQQNELKKHMKTHTGRKIYQCEYCEYSTTDASGFKRHVISIHTKDYPHRCEFCKKGFRRPSEKNQHIMRHHKEALM

SEQ ID NO: 38558 - protein, 10 aa, Homo sapiens
  REGION 1..10: note = ENSP00000391083
MGVLTFRDVA

SEQ ID NO: 38559 - protein, 427 aa, Homo sapiens
  REGION 1..427: note = ENSP00000400852
MGVLTFRDVAVEFSPEEWECLDSAQQRLYRDVMLENYGNLVSLGLAIFKPDLMTCLEQRKEPWKVKRQEAVAKHPAGSFHFTAEILPDHDIKDSFQKVILRKYGSCDLNNLHLKKDYQSVGNCKGQKSSYNGLHQCLSATHSKTCQCNKCGRGFQLCSIFTEHKDIFSREKCHKCEECGKDCRLFSDFTRHKKIHTVERCYKCEECGKAFKKFSNLTEHKRVHTGEKPYKCEGCGKTFTCSSTLVKHKRNHTGDRPYKCEECGKAFKCFSDLTNHKRIHTGEKPYKCEECNKAYRWFSDLAKHKIIHTGDKPYTCNECGKAFKWFSALSKHKRIHTGEKPYICEECGKAFTRSSTLFNHKRIHMEERPYKCEECSKTFKCFSDLTNHKRIHTGEKPYKCEECGKASSWFSHLIRHKRIHTREKLHKC

SEQ ID NO: 38560 - protein, 427 aa, Homo sapiens; identical to SEQ ID NO: 38559
  REGION 1..427: note = ENSP00000347210

SEQ ID NO: 38561 - protein, 737 aa, Homo sapiens
  REGION 1..737: note = ENSP00000437949
MTMLQESFSFDDLSVDFTQKEWQLLDPSQKNLYKDVMLENYSSLVSLGYEVMKPDVIFKLEQGEEPWVGDGEIPSSDSPVWKVDGNMMWHQDNQDKLKIIKRGHECDAFGKNFNLNMNFVPLRKSNSEGDLDGLILKHHLDLLIPKGDYGKAESDDFNVFDNFFLHSKPEDTDTWLKYYDCDKYKESYKKSQIIIYHRNRLGEKLYECSECRKRFSKKPSLIKHQSRHIRDIAFGCGNCGKTFPQKSQFITHHRTHTGEKPYNCSQCGKAFSQKSQLTSHQRTHTGEKPYECGECGKAFSRKSHLISHWRTHTGEKPYGCNECGRAFSEKSNLINHQRIHTGEKPFECRECGKAFSRKSQLVTHHRTHTGTKPFGCSDCRKAFFEKSELIRHQTIHTGEKPYECSECRKAFRERSSLINHQRTHTGEKPHGCIQCGKAFSQKSHLISHQMTHTGEKPFICSKCGKAFSRKSQLVRHQRTHTGEKPYECSECGKAFSEKLSLTNHQRIHTGEKPYVCSECGKAFCQKSHLISHQRTHTGEKPYECSECGKAFGEKSSLATHQRTHTGEKPYECRDCEKAFSQKSQLNTHQRIHTGEKPYECSLCRKAFFEKSELIRHLRTHTGEKPYECNECRKAFREKSSLINHQRIHTGEKPFECSECGKAFSRKSHLIPHQRTHTGEKPYGCSECRKAFSQKSQLVNHQRIHTGEKPYRCIECGKAFSQKSQLINHQRTHTVKKS

SEQ ID NO: 38562 - protein, 738 aa, Homo sapiens
  REGION 1..738: note = ENSP00000445549
MTMLQESFSFDDLSVDFTQKEWQLLDPSQKNLYKDVMLENYSSLVSLGYEVMKPDVIFKLEQGEEPWVGDGEIPSSDSPEVWKVDGNMMWHQDNQDKLKIIKRGHECDAFGKNFNLNMNFVPLRKSNSEGDLDGLILKHHLDLLIPKGDYGKAESDDFNVFDNFFLHSKPEDTDTWLKYYDCDKYKESYKKSQIIIYHRNRLGEKLYECSECRKRFSKKPSLIKHQSRHIRDIAFGCGNCGKTFPQKSQFITHHRTHTGEKPYNCSQCGKAFSQKSQLTSHQRTHTGEKPYECGECGKAFSRKSHLISHWRTHTGEKPYGCNECGRAFSEKSNLINHQRIHTGEKPFECRECGKAFSRKSQLVTHHRTHTGTKPFGCSDCRKAFFEKSELIRHQTIHTGEKPYECSECRKAFRERSSLINHQRTHTGEKPHGCIQCGKAFSQKSHLISHQMTHTGEKPFICSKCGKAFSRKSQLVRHQRTHTGEKPYECSECGKAFSEKLSLTNHQRIHTGEKPYVCSECGKAFCQKSHLISHQRTHTGEKPYECSECGKAFGEKSSLATHQRTHTGEKPYECRDCEKAFSQKSQLNTHQRIHTGEKPYECSLCRKAFFEKSELIRHLRTHTGEKPYECNECRKAFREKSSLINHQRIHTGEKPFECSECGKAFSRKSHLIPHQRTHTGEKPYGCSECRKAFSQKSQLVNHQRIHTGEKPYRCIECGKAFSQKSQLINHQRTHTVKKS

SEQ ID NO: 38563 - protein, 69 aa, Homo sapiens
  REGION 1..69: note = ENSP00000387416
MTMLQESFSFDDLSVDFTQKEWQLLDPSQKNLYKDVMLENYSSLVSLGYEVMKPDVIFKLEQGEEPWVG

SEQ ID NO: 38564 - protein, 236 aa, Homo sapiens
  REGION 1..236: note = ENSP00000445820
MTMLQESFSFDDLSVDFTQKEWQLLDPSQKNLYKDVMLENYSSLVSLGYEVMKPDVIFKLEQGEEPWVGDGEIPSSDSPEVWKVDGNMMWHQDNQDKLKIIKRGHECDAFGKNFNLNMNFVPLRKSNSEGDLDGLILKHHLDLLIPKGDYGKAESDDFNVFDNFFLHSKPEDTDTWLKYYDCDKYKESYKKSQIIIYHRNRLGEKLYECSECRKRFSKKPSLIKHQSRHIRDIAFG

SEQ ID NO: 38565 - protein, 55 aa, Homo sapiens
  REGION 1..55: note = ENSP00000445958
MTMLQESFSFDDLSVDFTQKEWQLLDPSQKNLYKDVMLENYSSLVSLGYEVMKPD

SEQ ID NO: 38566 - protein, 738 aa, Homo sapiens; identical to SEQ ID NO: 38562
  REGION 1..738: note = ENSP00000331465

SEQ ID NO: 38567 - protein, 78 aa, Homo sapiens
  REGION 1..78: note = ENSP00000438982
MTMLQESFSFDDLSVDFTQKEWQLLDPSQKNLYKDVMLENYSSLVSLGYEVMKPDVIFKLEQGEEPWVGDGEIPSSDS

SEQ ID NO: 38568 - protein, 6 aa, Homo sapiens
  REGION 1..6: note = ENSP00000437636
MTMLQV

SEQ ID NO: 38569 - protein, 84 aa, Homo sapiens
  REGION 1..84: note = ENSP00000442963
MTMLQESFSFDDLSVDFTQKEWQLLDPSQKNLYKDVMLENYSSLVSLGYEVMKPDVIFKLEQGEEPWVGDGEIPSSDSPGTSIV

SEQ ID NO: 38570 - protein, 145 aa, Homo sapiens
  REGION 1..145: note = ENSP00000439130
MTMLQESFSFDDLSVDFTQKEWQLLDPSQKNLYKDVMLENYSSLVSLGYEVMKPDVIFKLEQGEEPWVGDGEIPSSDSPVSGCFLPHGETWSAVREKNEAMMKAKSRKSPDCVPVPGSSGLHVQVHLCPFHVLIVEFFCEILQIS

SEQ ID NO: 38571 - protein, 738 aa, Homo sapiens; identical to SEQ ID NO: 38562
  REGION 1..738: note = ENSP00000376133

SEQ ID NO: 38572 - protein, 544 aa, Homo sapiens
  REGION 1..544: note = ENSP00000437590
MAVMDLSSPWALTKQDSACFHLRNAEEERMIAVFLTTWLQEPMTFKDVAVEFTQEEWMMLDSAQRSLYRDVMLENYRNLTSVEYQLYRLTVISPLDQEEIRNMKKRIPQAICPDQKIQPKTKESTVQKILWEEPSNAVKMIKLTMHNWSSTLREDWECHKIRKQHKIPGGHWRQMIYAPKKTVPQELFRDYHELEENSKLGSKLIFSQSIFTSKHCQKCYSEIGCLKHNSIINNYVKNSISEKLYESHECDTTLWHFQRNQTVQKEYTYSKHGMHFTHNMFPVPNNLHMAQNACECNKDETLCHQSSLKKQGQTHTEKKHECNQCGKAFKRISNLTLYKKSHMGEKQYECKECGKVFNDSSTLRRHVRTHTGEKPYECNQCGKAFSQKTSLKAHMRTHTGEKPYECNQCGKSFGTSSYLIVHKRIHTGEKLYECSECGKAFNTSSHLKVHKKIHTGENVYECSDCGKVFSGVSSLRMHIRTHTGEKPYECKECRKAFSVSSSLRRHVRIHTGEKPYECIQCGKAFSQSSSLIIHKRIHTERETL

SEQ ID NO: 38573 - protein, 154 aa, Homo sapiens
  REGION 1..154: note = ENSP00000304593
MVEKKTSVRSQDPGQRRVLDRAARQRRINRQLEALENDNFQDDPHAGLPQLGKRLPQFDDDADTGKKKKKTRGDHFKLRFRKNFQALLEEQNLSVAEGPNYLTACAGPPSRPQRPFCAVCGFPSPYTCVSCGARYCTVRCLGTHQETRCLKWTV

SEQ ID NO: 38574 - protein, 126 aa, Homo sapiens
  REGION 1..126: note = ENSP00000399966
MSVMDLANTCSSFQSDLDFCSDCGSVLPLPGAQDTVTCIRCGFNINVRDFEGKVVKTSVVFHQLGTAMPMSVEEGPECQGPVVDRRCPRCGHEGMAYHTRQMRSADEGQTVFYTCTNCKFQEKEDS

SEQ ID NO: 38575 - protein, 126 aa, Homo sapiens; identical to SEQ ID NO: 38574
  REGION 1..126: note = ENSP00000402198

SEQ ID NO: 38576 - protein, 126 aa, Homo sapiens; identical to SEQ ID NO: 38574
  REGION 1..126: note = ENSP00000414110

SEQ ID NO: 38577 - protein, 126 aa, Homo sapiens; identical to SEQ ID NO: 38574
  REGION 1..126: note = ENSP00000387914

SEQ ID NO: 38578 - protein, 126 aa, Homo sapiens; identical to SEQ ID NO: 38574
  REGION 1..126: note = ENSP00000412369

SEQ ID NO: 38579 - protein, 126 aa, Homo sapiens; identical to SEQ ID NO: 38574
  REGION 1..126: note = ENSP00000395397

SEQ ID NO: 38580 - protein, 126 aa, Homo sapiens; identical to SEQ ID NO: 38574
  REGION 1..126: note = ENSP00000405636

SEQ ID NO: 38581 - protein, 126 aa, Homo sapiens; identical to SEQ ID NO: 38574
  REGION 1..126: note = ENSP00000391809

SEQ ID NO: 38582 - protein, 126 aa, Homo sapiens; identical to SEQ ID NO: 38574
  REGION 1..126: note = ENSP00000407715

SEQ ID NO: 38583 - protein, 126 aa, Homo sapiens; identical to SEQ ID NO: 38574
  REGION 1..126: note = ENSP00000410954

SEQ ID NO: 38584 - protein, 126 aa, Homo sapiens; identical to SEQ ID NO: 38574
  REGION 1..126: note = ENSP00000413265

SEQ ID NO: 38585 - protein, 126 aa, Homo sapiens; identical to SEQ ID NO: 38574
  REGION 1..126: note = ENSP00000395065

SEQ ID NO: 38586 - protein, 126 aa, Homo sapiens; identical to SEQ ID NO: 38574
  REGION 1..126: note = ENSP00000414720

SEQ ID NO: 38587 - protein, 126 aa, Homo sapiens; identical to SEQ ID NO: 38574
  REGION 1..126: note = ENSP00000410530

SEQ ID NO: 38588 - protein, 126 aa, Homo sapiens; identical to SEQ ID NO: 38574
  REGION 1..126: note = ENSP00000399302

SEQ ID NO: 38589 - protein, 126 aa, Homo sapiens; identical to SEQ ID NO: 38574
  REGION 1..126: note = ENSP00000396661

SEQ ID NO: 38590 - protein, 126 aa, Homo sapiens; identical to SEQ ID NO: 38574
  REGION 1..126: note = ENSP00000383503

SEQ ID NO: 38591 - protein, 126 aa, Homo sapiens; identical to SEQ ID NO: 38574
  REGION 1..126: note = ENSP00000373108

SEQ ID NO: 38592 - protein, 126 aa, Homo sapiens; identical to SEQ ID NO: 38574
  REGION 1..126: note = ENSP00000383501

SEQ ID NO: 38593 - protein, 126 aa, Homo sapiens; identical to SEQ ID NO: 38574
  REGION 1..126: note = ENSP00000383500

SEQ ID NO: 38594 - protein, 126 aa, Homo sapiens; identical to SEQ ID NO: 38574
  REGION 1..126: note = ENSP00000410127

SEQ ID NO: 38595 - protein, 126 aa, Homo sapiens; identical to SEQ ID NO: 38574
  REGION 1..126: note = ENSP00000416599

SEQ ID NO: 38596 - protein, 126 aa, Homo sapiens; identical to SEQ ID NO: 38574
  REGION 1..126: note = ENSP00000393236

SEQ ID NO: 38597 - protein, 126 aa, Homo sapiens; identical to SEQ ID NO: 38574
  REGION 1..126: note = ENSP00000405264

SEQ ID NO: 38598 - protein, 126 aa, Homo sapiens; identical to SEQ ID NO: 38574
  REGION 1..126: note = ENSP00000397636

SEQ ID NO: 38599 - protein, 126 aa, Homo sapiens; identical to SEQ ID NO: 38574
  REGION 1..126: note = ENSP00000407364

SEQ ID NO: 38600 - protein, 126 aa, Homo sapiens; identical to SEQ ID NO: 38574
  REGION 1..126: note = ENSP00000394779

SEQ ID NO: 38601 - protein, 126 aa, Homo sapiens; identical to SEQ ID NO: 38574
  REGION 1..126: note = ENSP00000396922

SEQ ID NO: 38602 - protein, 126 aa, Homo sapiens; identical to SEQ ID NO: 38574
  REGION 1..126: note = ENSP00000331111

SEQ ID NO: 38603 - protein, 126 aa, Homo sapiens; identical to SEQ ID NO: 38574
  REGION 1..126: note = ENSP00000365978

SEQ ID NO: 38604 - protein, 126 aa, Homo sapiens; identical to SEQ ID NO: 38574
  REGION 1..126: note = ENSP00000352333

SEQ ID NO: 38605 - protein, 126 aa, Homo sapiens; identical to SEQ ID NO: 38574
  REGION 1..126: note = ENSP00000365981

SEQ ID NO: 38606 - protein, 227 aa, Homo sapiens
  REGION 1..227: note = ENSP00000335091
MGGKQSTAARSRGPFPGVSTDDSAVPPPGGAPHFGHYRTGGGAMGLRSRSVSSVAGMGMDPSTAGGVPFGLYTPASRGTGDSERAPGGGGSASDSTYAHGNGYQETGGGHHRDGMLYLGSRASLADALPLHIAPRWFSSHSGFKCPICSKSVASDEMEMHFIMCLSKPRLSYNDDVLTKDAGECVICLEELLQGDTIARLPCLCIYHKSCIDSWFEVNRSCPEHPAD

SEQ ID NO: 38607 - protein, 278 aa, Homo sapiens
  REGION 1..278: note = ENSP00000323362
MGGKQSTAARSRGPFPGVSTDDSAVPPPGGAPHFGHYRTGGGAMGLRSRSVSSVAGMGMDPSTAGGVPFGLYTPASRGTGDSERAPGGGGSASDSTYAHGNGYQETGGGHHRDGMLYLGSRASLADALPLHIAPRWFSSHSGFKCPICSKSVASDEMEMHFIMCLSKPRLSYNGRIQRSLRGAQPEKTWLSGRTLQEQPWRTECSWAPMAQMQSYPHCPVENREDDVLTKDAGECVICLEELLQGDTIARLPCLCIYHKSCIDSWFEVNRSCPEHPAD

SEQ ID NO: 38608 - protein, 209 aa, Homo sapiens
  REGION 1..209: note = ENSP00000456168
MGGKQSTAARSRGPFPGVSTDDSAVPPPGGAPHFGHYRTGGGAMGLRSRSVSSVAGMGMDPSTAGGVPFGLYTPASRGTGDSERAPGGGGSASDSTYAHGNGYQETGGGHHRDGMLYLGSRASLADALPLHIAPRWFSSHSGFKCPICSKSVASDEMEMHFIMCLSKPRLSYNDDVLTKDAGECVICLEELLQGDTIARLPCLCIYHKR

SEQ ID NO: 38609 - protein, 227 aa, Homo sapiens; identical to SEQ ID NO: 38606
  REGION 1..227: note = ENSP00000455601

SEQ ID NO: 38610 - protein, 52 aa, Homo sapiens
  REGION 1..52: note = ENSP00000462910
MEMHFIMCLSKPRLSYNDDVLTKDAGECVICLEELLQGDTIARLPCLCIYHK

SEQ ID NO: 38611 - protein, 78 aa, Homo sapiens
  REGION 1..78: note = ENSP00000457606
  VARIANT 1: note = Any amino acid
XDVLTKDAGECVICLEELLQGDTIARLPCLCIYHKRDRAPLLQGGGSPDPGAELSLGHQREQGTPSALTSRSWFSLPP

SEQ ID NO: 38612 - protein, 736 aa, Homo sapiens
  REGION 1..736: note = ENSP00000458991
MACRQRGGSWSPSGWFNAGWSTYRSISLFFALVTSGNSIDVSQLVNPAFPGTVTCDEREITVEFPSSPGTKKWHASVVDPLGLDMPNCTYILDPEKLTLRATYDNCTRRVHGGHQMTIRVMNNSAALRHGAVMYQFFCPAMQVEETQGLSASTICQKDFMSFSLPRVFSGLADDSKGTKVQMGWSIEVGDGARAKTLTLPEAMKEGFSLLIDNHRMTFHVPFNATGVTHYVQGNSHLYMVSLKLTFISPGQKVIFSSQAICAPDPVTCNATHMTLTIPEFPGKLKSVSFENQNIDVSQLHDNGIDLEATNGMKLHFSKTLLKTKLSEKCLLHQFYLASLKLTFLLRPETVSMVIYPECLCESPVSIVTGELCTQDGFMDVEVYSYQTQPALDLGTLRVGNSSCQPVFEAQSQGLVRFHIPLNGCGTRYKFEDDKVVYENEIHALWTDFPPSKISRDSEFRNDMLLNINVESLTPPVASVKLGPFTLILQSYPDNSYQQPYGENEYPLVRFLRQPIYMEVRVLNRDDPNIKLVLDDCWATSTMDPDSFPQWNVVVDGCAYDLDNYQTTFHPVGSSVTHPDHYQRFDMKAFAFVSEAHVLSSLVYFHCSALICNRLSPDSPLCSVTCPVSSRHRRATGATEAEKMTVSLPGPILLLSDDSSFRGVGSSDLKASGSSGEKSRSETGEEVGSRGAMDTKGHKTAGDVGSKAVAAVAAFAGVVATLGFIYYLYEKRTVSNH

SEQ ID NO: 38613 - protein, 745 aa, Homo sapiens
  REGION 1..745: note = ENSP00000460971
MACRQRGGSWSPSGWFNAGWSTYRSISLFFALVTSGNSIDVSQLVNPAFPGTVTCDEREITVEFPSSPGTKKWHASVVDPLGLDMPNCTYILDPEKLTLRATYDNCTRRVHGGHQMTIRVMNNSAALRHGAVMYQFFCPAMQVEETQGLSASTICQKDFMSFSLPRVFSGLADDSKGTKVQMGWSIEVGDGARAKTLTLPEAMKEGFSLLIDNHRMTFHVPFNATGVTHYVQGNSHLYMVSLKLTFISPGQKVIFSSQAICAPDPVTCNATHMTLTIPEFPGKLKSVSFENQNIDVSQLHDNGIDLEATNGMKLHFSKTLLKTKLSEKCLLHQFYLASLKLTFLLRPETVSMVIYPECLCESPVSIVTGELCTQDGFMDVEVYSYQTQPALDLGTLRVGNSSCQPVFEAQSQGLVRFHIPLNGCGTRYKFEDDKVVYENEIHALWTDFPPSKISRDSEFRMTVKCSYSRNDMLLNINVESLTPPVASVKLGPFTLILQSYPDNSYQQPYGENEYPLVRFLRQPIYMEVRVLNRDDPNIKLVLDDCWATSTMDPDSFPQWNVVVDGCAYDLDNYQTTFHPVGSSVTHPDHYQRFDMKAFAFVSEAHVLSSLVYFHCSALICNRLSPDSPLCSVTCPVSSRHRRATGATEAEKMTVSLPGPILLLSDDSSFRGVGSSDLKASGSSGEKSRSETGEEVGSRGAMDTKGHKTAGDVGSKAVAAVAAFAGVVATLGFIYYLYEKRTVSNH

SEQ ID NO: 38614 - protein, 736 aa, Homo sapiens; identical to SEQ ID NO: 38612
  REGION 1..736: note = ENSP00000491583

SEQ ID NO: 38615 - protein, 745 aa, Homo sapiens; identical to SEQ ID NO: 38613
  REGION 1..745: note = ENSP00000492703

SEQ ID NO: 38616 - protein, 852 aa, Homo sapiens
  REGION 1..852: note = ENSP00000380174
MMAKSALRENGTNSETFRQRFRRFHYQEVAGPREAFSQLWELCCRWLRPEVRTKEQIVELLVLEQFLTVLPGEIQNWVQEQCPENGEEAVTLVEDLEREPGRPRSSVTVSVKGQEVRLEKMTPPKSSQELLSVRQESVEPQPRGVPKKERARSPDLGPQEQMNPKEKLKPFQRSGLPFPKSGVVSRLEQGEPWIPDLLGSKEKELPSGSHIGDRRVHADLLPSKKDRRSWVEQDHWSFEDEKVAGVHWGYEETRTLLAILSQTEFYEALRNCHRNSQVYGAVAERLREYGFLRTLEQCRTKFKGLQKSYRKVKSGHPPETCPFFEEMEALMSAQVIALPSNGLEAAASHSGLVGSDAETEEPGQRGWQHEEGAEEAVAQESDSDDMDLEATPQDPNSAAPVVFRSPGGVHWGYEETKTYLAILSETQFYEALRNCHRNSQLYGAVAERLWEYGFLRTPEQCRTKFKSLQTSYRKVKNGQAPETCPFFEEMDALVSVRVAAPPNDGQEETASCPVQGTSEAEAQKQAEEADEATEEDSDDDEEDTEIPPGAVITRAPVLFQSPRGFEAGFENEDNSKRDISEEVQLHRTLLARSERKIPRYLHQGKGNESDCRSGRQWAKTSGEKRGKLTLPEKSLSEVLSQQRPCLGERPYKYLKYSKSFGPNSLLMHQVSHQVENPYKCADCGKSFSRSARLIRHRRIHTGEKPYKCLDCGKSFRDSSNFITHRRIHTGEKPYQCGECGKCFNQSSSLIIHQRTHTGEKPYQCEECGKSFNNSSHFSAHRRIHTGERPHVCPDCGKSFSKSSDLRAHHRTHTGEKPYGCHDCGKCFSKSSALNKHGEIHAREKLLTQSAPK

SEQ ID NO: 38617 - protein, 199 aa, Homo sapiens
  REGION 1..199: note = ENSP00000457835
MMAKSALRENGTNSETFRQRFRRFHYQEVAGPREAFSQLWELCCRWLRPEVRTKEQIVELLVLEQFLTVLPGEIQNWVQEQCPENGEEAVTLVEDLEREPGRPRSSVTVSVKGQEVRLEKMTPPKSSQELLSVRQESVEPQPRGVPKKERARSPDLGPQEQMNPKEKLKPFQRSGWSKESHGSQICWALRRKNFQVAAT

SEQ ID NO: 38618 - protein, 556 aa, Homo sapiens
  REGION 1..556: note = ENSP00000456089
MAKSALRENGTNSETFRQRFRRFHYQEVAGPREAFSQLWELCCRWLRPEVRTKEQIVELLVLEQFLTVLPGEIQNWVQEQCPENGEEAVTLVEDLEREPGRPRSSVTVSVKGQEVRLEKMTPPKSSQELLSVRQESVEPQPRGVPKKERARSPDLGPQEQMNPKEKLKPFQRSGLPFPKSGVVSRLEQGEPWIPDLLGSKEKELPSGSHIGDRRVHADLLPSKKDRRSWVEQDHWSFEDEKVAGVHWGYEETRTLLAILSQTEFYEALRNCHRNSQVYGAVAERLREYGFLRTLEQCRTKFKGLQKSYRKVKSGHPPETCPFFEEMEALMSAQVIALPSNGLEAAASHSGLVGSDAETEEPGQRGWQHEEGAEEAVAQESDSDDMDLEATPQDPNSAAPVVFRSPGGVHWGYEETKTYLAILSETQFYEALRNCHRNSQLYGAVAERLWEYGFLRTPEQCRTKFKSLQTSYRKVKNGQAPETCPFFEEMDALVLKLDLRMKIIQNGIFLRKYNCIGHYLQDLKGKFPGIFIRVKAMRVTVDQEDSGQRPQGRKEEN

SEQ ID NO: 38619 - protein, 462 aa, Homo sapiens
  REGION 1..462: note = ENSP00000456883
MAKSALRENGTNSETFRQRFRRFHYQEVAGPREAFSQLWELCCRWLRPEVRTKEQIVELLVLEQFLTVLPGEIQNWVQEQCPENGEEAVTLVEDLEREPGRPRSSVTVSVKGQEVRLEKMTPPKSSQELLSVRQESVEPQPRGVPKKERARSPDLGPQEQMNPKEKLKPFQRSGFEAGFENEDNSKRDISEEVQLHRTLLARSERKIPRYLHQGKGNESDCRSGRQWAKTSGEKRGKLTLPEKSLSEVLSQQRPCLGERPYKYLKYSKSFGPNSLLMHQVSHQVENPYKCADCGKSFSRSARLIRHRRIHTGEKPYKCLDCGKSFRDSSNFITHRRIHTGEKPYQCGECGKCFNQSSSLIIHQRTHTGEKPYQCEECGKSFNNSSHFSAHRRIHTGERPHVCPDCGKSFSKSSDLRAHHRTHTGEKPYGCHDCGKCFSKSSALNKHGEIHAREKLLTQSAPK

SEQ ID NO: 38620 - protein, 330 aa, Homo sapiens
  REGION 1..330: note = ENSP00000454548
EQCPENGEEAVTLVEDLEREPGRPRSSVTVSVKGQEVRLEKMTPPKSSQELLSVRQESVEPQPRGVPKKERARSPDLGPQEQMNPKEKLKPFQRSGLPFPKSGVVSRLEQGEPWIPDLLGSKEKELPSGSHIGDRRVHADLLPSKKDRRSWVEQDHWSFEDEKVAGVHWGYEETRTLLAILSQTEFYEALRNCHRNSQVYGAVAERLREYGFLRTLEQCRTKFKGLQKSYRKVKSGHPPETCPFFEEMEALMSAQVIALPSNGLEAAASHSGLVGSDAETEEPGQRGWQHEEGAEEAVAQESDSDDMDLEATPQDPNSAAPVVFRSPGGA

SEQ ID NO: 38621 - protein, 21 aa, Homo sapiens
  REGION 1..21: note = ENSP00000458119
MMAKSALRENGTNSETFRQRF

SEQ ID NO: 38622 - protein, 316 aa, Homo sapiens
  REGION 1..316: note = ENSP00000380170
MSRKWRGGSDSRGRFRKRAWKTIFGHSLCEGAGSALGEDDTPEIITRVIKCSAGVSGTPAQGCTQEREGKKPRPGTTGADEPKGEAQTFSKERLEQGEPWIPDLLGSKEKELPSGSHIGDRRVHADLLPSKKDRRSWVEQDHWSFEDEKVAGVHWGYEETRTLLAILSQTEFYEALRNCHRNSQVYGAVAERLREYGFLRTLEQCRTKFKGLQKSYRKVKSGHPPETCPFFEEMEALMSAQVIALPSNGLEAAASHSGLVGSDAETEEPGQRGWQHEEGAEEAVAQESDSDDMDLEATPQDPNSAAPVVFRSPGGA

SEQ ID NO: 38623 - protein, 494 aa, Homo sapiens
  REGION 1..494: note = ENSP00000329738
MSGEATVLAYHAPEEQEGLLVVKVEEENYVLDQDFGLQENPWSQEVFRQKFRQFSYSDSTGPREALSRLRELCCQWLRPEVHSKEQILELLMLEQFLAILPEELQAWLREHRPENGEEAVTMLEELEKELEEPRQQDTTHGQEMFWQEMTSTGALKSLSLNSPVQPLENQCKTETQESQAFQERDGRMVAGKVLMAKQEIVECVASAAMISPGKLPGETHSQRIAEEALGGLDNSKKQKGNAAGNKISQLPSQDRHFSLATFNRRIPTEHSVLESHESEGSFSMNSNDITQQSVDTREKLYECFDCGKAFCQSSKLIRHQRIHTGERPYACKECGKAFSLSSDLVRHQRIHSGEKPYECCECGKAFRGSSELIRHRRIHTGEKPYECGECGKAFSRSSALIQHKKIHTGDKSYECIACGKAFGRSSILIEHQRIHTGEKPYECNECGKSFNQSSALTQHQRIHTGEKPYECSECRKTFRHRSGLMQHQRTHTRV

SEQ ID NO: 38624 - protein, 494 aa, Homo sapiens; identical to SEQ ID NO: 38623
  REGION 1..494: note = ENSP00000392371

SEQ ID NO: 38625 - protein, 221 aa, Homo sapiens
  REGION 1..221: note = ENSP00000465046
MSGEATVLAYHAPEEQEGLLVVKVEEENYVLDQDFGLQENPWSQEVFRQKFRQFSYSDSTGPREALSRLRELCCQWLRPEVHSKEQILELLMLEQFLAILPEELQAWLREHRPENGEEAVTMLEELEKELEEPRQQDTTHGQEMFWQEMTSTGALKSLSLNSPVQPLENQCKTETQESQAFQERDGVSLYHPGWSAVVQPQLTAAALNPWVKVILLPQPPE

SEQ ID NO: 38626 - protein, 91 aa, Homo sapiens
  REGION 1..91: note = ENSP00000470677
ELQAWLREHRPENGEEAVTMLEELEKELEEPRQQDTTHGQEMFWQEMTSTGALKSLSLNSPVQPLENQCKTETQESQAFQERGEKPQSMWG

SEQ ID NO: 38627 - protein, 51 aa, Homo sapiens
  REGION 1..51: note = ENSP00000472179
MSGEATVLAYHAPEEQEGLLVVKVEEENYVLDQDFGLQENPWSQEKCSGRK

SEQ ID NO: 38628 - protein, 145 aa, Homo sapiens
  REGION 1..145: note = ENSP00000470443
MSGEATVLAYHAPEEQEGLLVVKVEEENYVLDQDFGLQENPWSQEVFRQKFRQFSYSDSTGPREALSRLRELCCQWLRPEVHSKEQILELLMLEQFLAILPEELQAWLREHRPENGEEAVTMLEELEKELEEPRQQEFSACVSSE

SEQ ID NO: 38629 - protein, 69 aa, Homo sapiens
  REGION 1..69: note = ENSP00000468180
MSGEATVLAYHAPEEQEGLLVVKVEEENYVLDQDFGLQENPWSQEVFRQKFRQFSYSDSTGPREALSRL

SEQ ID NO: 38630 - protein, 47 aa, Homo sapiens
  REGION 1..47: note = ENSP00000467308
MSGEATVLAYHAPEEQEGLLVVKVEEENYVLDQDFGLQENPWSQEVF

SEQ ID NO: 38631 - protein, 307 aa, Homo sapiens
  REGION 1..307: note = ENSP00000480152
MVAGKVLMAKQEIVECVASAAMISPGKLPGETHSQRIAEEALGGLDNSKKQKGNAAGNKISQLPSQDRHFSLATFNRRIPTEHSVLESHESEGSFSMNSNDITQQSVDTREKLYECFDCGKAFCQSSKLIRHQRIHTGERPYACKECGKAFSLSSDLVRHQRIHSGEKPYECCECGKAFRGSSELIRHRRIHTGEKPYECGECGKAFSRSSALIQHKKIHTGDKSYECIACGKAFGRSSILIEHQRIHTGEKPYECNECGKSFNQSSALTQHQRIHTGEKPYECSECRKTFRHRSGLMQHQRTHTRV

SEQ ID NO: 38632 - protein, 435 aa, Homo sapiens [sequence omitted]

SEQ ID NO: 38633 - protein, 1215 aa, Homo sapiens
  REGION 1..1215: note = ENSP00000252744
MAERGQQPPPAKRLCCRPGGGGGGGGSSGGGGGAGGGYSSACRPGPRAGGAAAAAACGGGAALGLLPPGKTQSPESLLDIAARRVAEKWPFQRVEERFERIPEPVQRRIVYWSFPRSEREICMYSSFNTGGGAAGGPGDDSGGGGGAGGGGGGGSSSSPAATSAAATSAAAAAAAAAAAAAAAAGAGAPSVGAAGAADGGDETRLPFRRGIALLESGCVDNVLQVGFHLSGTVTEPAIQSEPETVCNVAISFDRCKITSVTCSCGNKDIFYCAHVVALSLYRIRKPDQVKLHLPISETLFQMNRDQLQKFVQYLITVHHTEVLPTAQKLADEILSQNSEINQVHGAPDPTAGASIDDENCWHLDEEQVQEQVKLFLSQGGYHGSGKQLNLLFAKVREMLKMRDSNGARMLTLITEQFMADPRLSLWRQQGTAMTDKYRQLWDELGALWMCIVLNPHCKLEQKASWLKQLKKWNSVDVCPWEDGNHGSELPNLTNALPQGANANQDSSNRPHRTVFTRAIEACDLHWQDSHLQHIISSDLYTNYCYHDDTENSLFDSRGWPLWHEHVPTACARVDALRSHGYPREALRLAIAIVNTLRRQQQKQLEMFRTQKKELPHKNITSITNLEGWVGHPLDPVGTLFSSLMEACRIDDENLSGFSDFTENMGQCKSLEYQHLPAHKFLEEGESYLTLAVEVALIGLGQQRIMPDGLYTQEKVCRNEEQLISKLQEIELDDTLVKIFRKQAVFLLEAGPYSGLGEIIHRESVPMHTFAKYLFTSLLPHDAELAYKIALRAMRLLVLESTAPSGDLTRPHHIASVVPNRYPRWFTLSHIESQQCELASTMLTAAKGDVRRLETVLESIQKNIHSSSHIFKLAQDAFKIATLMDSLPDITLLKVSLELGLQVMRMTLSTLNWRRREMVRWLVTCATEVGVYALDSIMQTWFTLFTPTEATSIVATTVMSNSTIVRLHLDCHQQEKLASSARTLALQCAMKDPQNCALSALTLCEKDHIAFETAYQIVLDAATTGMSYTQLFTIARYMEHRGYPMRAYKLATLAMTHLNLSYNQDTHPAINDVLWACALSHSLGKNELAAIIPLVVKSVKCATVLSDILRRCTLTTPGMVGLHGRRNSGKLMSLDKAPLRQLLDATIGAYINTTHSRLTHISPRHYSEFIEFLSKARETFLMAHDGHIQFTQFIDNLKQIYKGKKKLMMLVRERFG

SEQ ID NO: 38634 - protein, 417 aa, Homo sapiens
  REGION 1..417: note = ENSP00000360587
MSQISEALSRYRNRSCFVKEALHRLFTETFSMEVTMPAILKLVAIGMRNHPLDLRVQFTASACALNLTRQGLAKGMPVRLLSEVTCLLFKALKNFPHYQQLQKNCLLSLTNSRILVDVPFDRFDAAKFVMRWLCKHENPKMQTMAVSVTSILALQLSPEQTAQLEELFMAVKELLAIVKQKTTENLDDVTFLFTLKALWNLTDGSPAACKHFIENQGLQIFIQVLETFSESAIQSKVLGLLNNIAEVRELSSKLVTEDVLKHINSLLCSREMEVSYFAAGIIAHLTSDRQLWISRDFQRRTLLQDLHATIQNWPSSSCKMTALVTYRSFKTFFPLLGNFSQPEVQLWALWAMYHVCSKNPSKYCKMLVEEEGLQLLCDIQEHSEATPKAQQIAASILDDFRMHFMNYQRPTLCQMPF

SEQ ID NO: 38635 - protein, 759 aa, Homo sapiens
  REGION 1..759: note = ENSP00000360583
MVHFLHPGHTPRNIVPPDAQKDALGCCVVQEEASPYTLVNICLNVLIANLEKLCSERPDGTLCLPEHWSFPQEVAERFLRVMTWQGKLTDRTASIFRGNQMKLKLVNIQKAKISTAAFIKAFCRHKLIELNATAVHADLPVPDIISGLCSNRWIQQNLQCLLLDSTSIPQNSRLLFFSQLTGLRILSVFNVCFHTEDLANVSQLPRLESLDISNTLVTDISALLTCKDRLKSLTMHYLKCLAMTKSQILAVIRELKCLLHLDISDHRQLKSDLAFHLLQQKDILPNVVSLDISGGNCITDEAVELFIRLRPAMQFVGLLATDAGSSDFFTTKQGLRVAGGASMSQISEALSRYRNRSCFVKEALHRLFTETFSMEVTMPAILKLVAIGMRNHPLDLRVQFTASACALNLTRQGLAKGMPVRLLSEVTCLLFKALKNFPHYQQLQKNCLLSLTNSRILVDVPFDRFDAAKFVMRWLCKHENPKMQTMAVSVTSILALQLSPEQTAQLEELFMAVKELLAIVKQKTTENLDDVTFLFTLKALWNLTDGSPAACKHFIENQGLQIFIQVLETFSESAIQSKVLGLLNNIAEVRELSSKLVTEDVLKHINSLLCSREMEVSYFAAGIIAHLTSDRQLWISRDFQRRTLLQDLHATIQNWPSSSCKMTALVTYRSFKTFFPLLGNFSQPEVQLWALWAMYHVCSKNPSKYCKMLVEEEGLQLLCDIQEHSEATPKAQQIAASILDDFRMHFMNYQRPTLCQMPF

SEQ ID NO: 38636 - protein, 417 aa, Homo sapiens; identical to SEQ ID NO: 38634
  REGION 1..417: note = ENSP00000482761

SEQ ID NO: 38637 - protein, 572 aa, Homo sapiens
  REGION 1..572: note = ENSP00000324422
MAAPRPSPAISVSVSAPAFYAPQKKFGPVVAPKPKVNPFRPGDSEPPPAPGAQRAQMGRVGEIPPPPPEDFPLPPPPLAGDGDDAEGALGGAFPPPPPPIEESFPPAPLEEEIFPSPPPPPEEEGGPEAPIPPPPQPREKVSSIDLEIDSLSSLLDDMTKNDPFKARVSSGYVPPPVATPFSSKSSTKPAAGGTAPLPPWKSPSSSQPLPQVPAPAQSQTQFHVQPQPQPKPQVQLHVQSQTQPVSLANTQPRGPPASSPAPAPKFSPVTPKFTPVASKFSPGAPGGSGSQPNQKLGHPEALSAGTGSPQPPSFTYAQQREKPRVQEKQHPVPPPAQNQNQVRSPGAPGPLTLKEVEELEQLTQQLMQDMEHPQRQNVAVNELCGRCHQPLARAQPAVRALGQLFHIACFTCHQCAQQLQGQQFYSLEGAPYCEGCYTDTLEKCNTCGEPITDRMLRATGKAYHPHCFTCVVCARPLEGTSFIVDQANRPHCVPDYHKQYAPRCSVCSEPIMPEPGRDETVRVVALDKNFHMKCYKCEDCGKPLSIEADDNGCFPLDGHVLCRKCHTARAQT

SEQ ID NO: 38638 - protein, 177 aa, Homo sapiens
  REGION 1..177: note = ENSP00000413467
PSVCPSPPGWRLLRTGTQSLRTRRRGGHPRRGAHAPACDFPLPPPPLAGDGDDAEGALGGAFPPPPPPIEESFPPAPLEEEIFPSPPPPPEEEGGPEAPIPPPPQPREKVSSIDLEIDSLSSLLDDMTKNDPFKARVSSGYVPPPVATPFSSKSSTKPAAGGTAPLPPWKSPSSSQP

SEQ ID NO: 38639 - protein, 164 aa, Homo sapiens
  REGION 1..164: note = ENSP00000400537
MAAPRPSPAISVSVSAPAFYAPQKKFGPVVAPKPKVNPFRPGDSEPPPAPGAQRAQMGRVGEIPPPPPEDFPLPPPPLAGDGDDAEGALGGAFPPPPPPIEESFPPAPLEEEIFPSPPPPPEEEGGPEAPIPPPPQPREKVSSIDLEIDSLSSLLDDMTKNDPF

SEQ ID NO: 38640 - protein, 540 aa, Homo sapiens
  REGION 1..540: note = ENSP00000346417
AAPRPSPAISVSVSAPAFYAPQKKFGPVVAPKPKVNPFRPGDSEPPPAPGAQRAQMGRVGEIPPPPPEDFPLPPPPLAGDGDDAEGALGGAFPPPPPPIEESFPPAPLEEEIFPSPPPPPEEEGGPEAPIPPPPQVSSGYVPPPVATPFSSKSSTKPAAGGTAPLPPWKSPSSSQPLPQVPAPAQSQTQFHVQPQPQPKPQVQLHVQSQTQPVSLANTQPRGPPASSPAPAPKFSPVTPKFTPVASKFSPGAPGGSGSQPNQKLGHPEALSAGTGSPQPPSFTYAQQREKPRVQEKQHPVPPPAQNQNQVRSPGAPGPLTLKEVEELEQLTQQLMQDMEHPQRQNVAVNELCGRCHQPLARAQPAVRALGQLFHIACFTCHQCAQQLQGQQFYSLEGAPYCEGCYTDTLEKCNTCGEPITDRMLRATGKAYHPHCFTCVVCARPLEGTSFIVDQANRPHCVPDYHKQYAPRCSVCSEPIMPEPGRDETVRVVALDKNFHMKCYKCEDCGKPLSIEADDNGCFPLDGHVLCRKCHTARAQT

SEQ ID NO: 38641 - protein, 415 aa, Homo sapiens
  REGION 1..415: note = ENSP00000376642
MTKNDPFKARVSSGYVPPPVATPFSSKSSTKPAAGGTAPLPPWKSPSSSQPLPQVPAPAQSQTQFHVQPQPQPKPQVQLHVQSQTQPVSLANTQPRGPPASSPAPAPKFSPVTPKFTPVASKFSPGAPGGSGSQPNQKLGHPEALSAGTGSPQPPSFTYAQQREKPRVQEKQHPVPPPAQNQNQVRSPGAPGPLTLKEVEELEQLTQQLMQDMEHPQRQNVAVNELCGRCHQPLARAQPAVRALGQLFHIACFTCHQCAQQLQGQQFYSLEGAPYCEGCYTDTLEKCNTCGEPITDRMLRATGKAYHPHCFTCVVCARPLEGTSFIVDQANRPHCVPDYHKQYAPRCSVCSEPIMPEPGRDETVRVVALDKNFHMKCYKCEDCGKPLSIEADDNGCFPLDGHVLCRKCHTARAQT

SEQ ID NO: 38642 - protein, 176 aa, Homo sapiens
  REGION 1..176: note = ENSP00000411230
  VARIANT 1: note = Any amino acid
XSSTKPAAGGTAPLPPWKSPSSSQPLPQVPAPAQSQTQFHVQPQPQPKPQVQLHVQSQTQPVSLANTQPRGPPASSPAPAPKFSPVTPKFTPVASKFSPGAPGGSGSQPNQKLGHPEALSAGTGSPQPPSFTYAQQREKPRVQEKQHPVPPPAQNQNQGLLSSRQAGCAPLGPQGP

SEQ ID NO: 38643 - protein, 171 aa, Homo sapiens
  REGION 1..171: note = ENSP00000403714
MSTYTRTQHRKKCQGPVSFAESWAAQQQAGRVRSPGAPGPLTLKEVEELEQLTQQLMQDMEHPQRQNVAVNELCGRCHQPLARAQPAVRALGQLFHIACFTCHQCAQQLQGQQFYSLEGAPYCEGCYTDTLEKCNTCGEPITDRMLRATGKAYHPHCFTCVVCARPLEGTS

SEQ ID NO: 38644 - protein, 124 aa, Homo sapiens
  REGION 1..124: note = ENSP00000482745
MADEKPSNGVLVHMVKLLIKTFLDGIFDDLMENNVLNTDEIHLIGKCLKFVVSNAENLVDDITETAQIAGKIFREHLWNSKKQLSSDISSDGEREANMPGLNIRNKEFNYLHNRNGSELDLLGM

SEQ ID NO: 38645 - protein, 216 aa, Homo sapiens
  REGION 1..216: note = ENSP00000482745
DLLENLGYSVVIKENLTAQEMETALRQFAAHPEHQSSDSTFLVFMSHSILNGICGTKHWDQEPDVLHDDTIFEIFNNRNCQSLKDKPKVIIMQACRGNGAGIVWFTTDSGKASADTHGRLLQGNICNDAVTKAHVEKDFIAFKSSTPHNVSWRHETNGSVFISQIIYYFREYSWSHHLEEIFQKVQHSFETPNILTQLPTIERLSMTRYFYLFPGN

SEQ ID NO: 38646 - protein, 124 aa, Homo sapiens; identical to SEQ ID NO: 38644
  REGION 1..124: note = ENSP00000424038

SEQ ID NO: 38647 - protein, 216 aa, Homo sapiens; identical to SEQ ID NO: 38645
  REGION 1..216: note = ENSP00000424038

SEQ ID NO: 38648 - protein, 40 aa, Homo sapiens
  REGION 1..40: note = ENSP00000426427
MADISSDGEREANMPGLNIRNKEFNYLHNRNGSELDLLGM

SEQ ID NO: 38649 - protein, 99 aa, Homo sapiens
  REGION 1..99: note = ENSP00000426427
DLLENLGYSVVIKENLTAQMVLGLFGSPLTVEKPVQILMVGSCKVTSVMMLLQRLMWKRTSLLSNLPHHIMFLGDMKQMALSSFPKLSTTSESILGVII

SEQ ID NO: 38650 - protein, 124 aa, Homo sapiens; identical to SEQ ID NO: 38644
  REGION 1..124: note = ENSP00000425652

SEQ ID NO: 38651 - protein, 152 aa, Homo sapiens
  REGION 1..152: note = ENSP00000425652
DLLENLGYSVVIKENLTAQEMETALRQFAAHPEHQSSDSTFLVFMSHSILNGICGTKHWDQEPDVLHDDTIFEIFNNRNCQSLKDKPKVIIMQACRGNGAGIVWFTTDSGKASADTHGRLLQGNICNDAVTKAHVEKDFIAFKSSTPRSTFI

SEQ ID NO: 38652 - protein, 124 aa, Homo sapiens; identical to SEQ ID NO: 38644
  REGION 1..124: note = ENSP00000423970

SEQ ID NO: 38653 - protein, 170 aa, Homo sapiens
  REGION 1..170: note = ENSP00000423970
DLLENLGYSVVIKENLTAQEMETALRQFAAHPEHQSSDSTFLVFMSHSILNGICGTKHWDQEPDVLHDDTIFEIFNNRNCQSLKDKPKMVLGLFGSPLTVEKPVQILMVGSCKVTSVMMLLQRLMWKRTSLLSNLPHHVQHSFETPNILTQLPTIERLSMTRYFYLFPGN

SEQ ID NO: 38654 - protein, 40 aa, Homo sapiens; identical to SEQ ID NO: 38648
  REGION 1..40: note = ENSP00000427437

SEQ ID NO: 38655 - protein, 101 aa, Homo sapiens
  REGION 1..101: note = ENSP00000427437
DLLENLGYSVVIKENLTAQMVLGLFGSPLTVEKPVQILMVGSCKVTSVMMLLQRLMWKRTSLLSNLPHHVQHSFETPNILTQLPTIERLSMTRYFYLFPGN

SEQ ID NO: 38656 - protein, 124 aa, Homo sapiens; identical to SEQ ID NO: 38644
  REGION 1..124: note = ENSP00000423899

SEQ ID NO: 38657 - protein, 99 aa, Homo sapiens; identical to SEQ ID NO: 38649
  REGION 1..99: note = ENSP00000423899

SEQ ID NO: 38658 - protein, 124 aa, Homo sapiens; identical to SEQ ID NO: 38644
  REGION 1..124: note = ENSP00000421815

SEQ ID NO: 38659 - protein, 101 aa, Homo sapiens; identical to SEQ ID NO: 38655
  REGION 1..101: note = ENSP00000421815

SEQ ID NO: 38660 - protein, 40 aa, Homo sapiens; identical to SEQ ID NO: 38648
  REGION 1..40: note = ENSP00000426566

SEQ ID NO: 38661 - protein, 216 aa, Homo sapiens; identical to SEQ ID NO: 38645
  REGION 1..216: note = ENSP00000426566
